(19) United States
(12) Patent Application Publication
(10) Pub. No.: US 2007/0059799 A1
(43) Pub. Date: Mar. 15, 2007

(54) Inducing cellular immune responses to hepatitis B virus using peptide and nucleic acid compositions

(75) Inventors: Alessandro Sette, La Jolla, CA (US); John Sidney, La Jolla, CA (US); Scott Southwood, Santee, CA (US); Maria Vitiello, La Jolla, CA (US); Brian Livingston, San Diego, CA (US); Esteban Celis, Tampa, FL (US); Ralph Kubo, Carlsbad, CA (US); Howard Grey, La Jolla, CA (US); Robert Chesnut, Cardiff-by-the-sea, CA (US)

Correspondence Address: STERNE, KESSLER, GOLDSTEIN & FOX, P.L.L.C., 1100 NEW YORK AVE., WASHINGTON, DC, 20005, US

(73) Assignee: Pharmexa Inc., San Diego, CA (US)

(21) Appl. No.: 11/522,314

(22) Filed: Sep. 18, 2006

Related U.S. Application Data
(63) Continuation of application No. 10/363,990, filed on Sep. 3, 2003.
(63) Continuation-in-part of application No. 09/350,401, filed on Jul. 8, 1999.
Application No. 09/350,401 is a continuation-in-part of application No. 09/239,043, filed on Jan. 27, 1999, now Pat. No. 6,689,363.

(51) Int. Cl. C12Q 1/68; C12P 21/06

(52) U.S. Cl. 435/69.1; 435/6

(57) ABSTRACT

This invention uses our knowledge of the mechanisms by which antigen is recognized by T cells to develop epitope-based vaccines directed towards HBV. More specifically, this application communicates our discovery of pharmaceutical compositions and methods of use in the prevention and treatment of HBV infection.

### CROSS REFERENCE TO RELATED APPLICATIONS

[0001] The present application is a continuation of U.S. application Ser. No. 10/363,990, which is a national stage application of International Appl. No. PCT/US00/24802, filed Sep. 8, 2000, which published under PCT Article 21(2) in English, each of which is herein incorporated by reference; and is a continuation-in-part of U.S. application Ser. No. 09/350,401, filed Jul. 8, 1999, which is a continuation-in-part of U.S. application Ser. No. 09/239,043, filed Jan. 27, 1999, now U.S. Pat. No. 6,689,363 B1.

### STATEMENT REGARDING FEDERALLY-SPONSORED RESEARCH AND DEVELOPMENT

[0002] This invention was funded, in part, by the United States government under grants with the National Institutes of Health. The u.s. government has certain rights in this invention.

### REFERENCE TO A SEQUENCE LISTING SUBMITTED ON A COMPACT DISC

[0003] This application includes a “Sequence Listing,” which is provided as an electronic document on a compact disc (CD-R). This compact disc contains the file “Sequence Listing.txt” (808,960 bytes, created on Aug. 30, 2006), which is hereby incorporated by reference in its entirety.

### BACKGROUND OF THE INVENTION

### FIELD OF THE INVENTION

[0004] Chronic infection by hepatitis B virus (HBV) affects at least 5% of the world's population and is a major cause of cirrhosis and hepatocellular carcinoma (Hoofnagle, J., N. Engl. J. Med. 323:337, 1990; Fields, B. and Knipe, D., In: Fields Virology 2:2137, 1990). The World Health Organization lists hepatitis B as a leading cause of death worldwide, close behind chronic pulmonary disease, and more prevalent than AIDS. Chronic HBV infection can range from an asymptomatic carrier state to continuous hepatocellular necrosis and inflammation, and can lead to hepatocellular carcinoma.

[0005] The immune response to HBV is believed to play an important role in controlling hepatitis B infection. A variety of humoral and cellular responses to different regions of HBV including the nucleocapsid core, polymerase, and surface antigens have been identified. T cell-mediated immunity, particularly involving class I human leukocyte antigen-restricted cytotoxic T lymphocytes (CTL), is believed to be crucial in combatting established HBV infection.

[0006] Class I human leukocyte antigen (HLA) molecules are expressed on the surface of almost all nucleated cells. CTL recognize peptide fragments, derived from intracellular processing of various antigens, in the form of a complex with class I HLA molecules. This recognition event then results in the destruction of the cell bearing the HLA-peptide complex directly or the activation of non-destructive mechanisms e.g., the production of interferon, that inhibit viral replication.

[0007] Several studies have emphasized the association between self-limiting acute hepatitis and multispecific CTL responses (Penna, A. et al., J. Exp. Med. 174:1565, 1991; Nayersina, R. et al., J. Immunol. 150:4659, 1993). Spontaneous and interferon-related clearance of chronic HBV infection is also associated with the resurgence of a vigorous CTL response (Guidotti, L. G. et al., Proc. Natl. Acad. Sci. USA 91:3764, 1994). In all such cases the CTL responses are polyclonal, and specific for multiple viral proteins including the HBV envelope, core and polymerase antigens. By contrast, in patients with chronic hepatitis, the CTL activity is usually absent or weak, and antigenically restricted.

[0008] The crucial role of CTL in resolution of HBV infection has been further underscored by studies using HBV transgenic mice. Adoptive transfer of HBV-specific CTL into mice transgenic for the HBV genome resulted in suppression of virus replication. This effect was primarily mediated by a non-lytic, lymphokine-based mechanism (Guidotti, L. G. et al., Proc. Natl. Acad. Sci. USA 91:3764, 1994; Guidotti, L. G., Guilhot, S., and Chisari, F. V. J. Virol. 68:1265, 1994; Guidotti, L. G. et al., J. Virol. 69:6158, 1995; Gilles, P. N., Fey, G., and Chisari, F. V., J. Virol. 66:3955, 1992).

[0009] As is the case for HLA class I restricted responses, HLA class II restricted T cell responses are usually detected in patients with acute hepatitis, and are absent or weak in patients with chronic infection (Chisari, F. V. and Ferrari, C., Annu. Rev. Immunol. 13:29, 1995). HLA Class II responses are tied to activation of helper T cells (HTLs) Helper T lymphocytes, which recognize Class II HLA molecules, may directly contribute to the clearance of HBV infection through the secretion of cytokines which suppress viral replication (Franco, A. et al., J. Immunol. 159:2001, 1997). However, their primary role in disease resolution is believed to be mediated by inducing activation and expansion of virus-specific CTL and B cells.

[0010] In view of the heterogeneous immune response observed with HBV infection, induction of a multi-specific cellular immune response directed simultaneously against multiple epitopes appears to be important for the development of an efficacious vaccine against HBV. There is a need to establish vaccine embodiments that elicit immune responses that correspond to responses seen in patients that clear HBV infection. Epitope-based vaccines appear useful.

[0011] Upon development of appropriate technology, the use of epitope-based vaccines has several advantages over current vaccines. The epitopes for inclusion in such a vaccine are to be selected from conserved regions of viral or tumor-associated antigens, in order to reduce the likelihood of escape mutants. The advantage of an epitope-based approach over the use of whole antigens is that there is evidence that the immune response to whole antigens is directed largely toward variable regions of the antigen, allowing for immune escape due to mutations. Furthermore, immunosuppressive epitopes that may be present in whole antigens can be avoided with the use of epitope-based vaccines.

[0012] Additionally, with an epitope-based vaccine approach, there is an ability to combine selected epitopes (CTL and HTL) and additionally to modify the composition of the epitopes, achieving, for example, enhanced immunogenicity. Accordingly, the immune response can be modulated, as appropriate, for the target disease. Similar engineering of the response is not possible with traditional approaches.

[0013] Another major benefit of epitope-based immune-stimulating vaccines is their safety. The possible pathological side effects caused by infectious agents or whole protein antigens, which might have their own intrinsic biological activity, is eliminated.

[0014] An epitope-based vaccine also provides the ability to direct and focus an immune response to multiple selected antigens from the same pathogen. Thus, patient-by-patient variability in the immune response to a particular pathogen may be alleviated by inclusion of epitopes from multiple antigens from that pathogen in a vaccine composition. A “pathogen” may be an infectious agent or a tumor associated molecule.

[0015] However, one of the most formidable obstacles to the development of broadly efficacious epitope-based immunotherapeutics has been the extreme polymorphism of HLA molecules. To date, effective non-genetically biased coverage of a population has been a task of considerable complexity; such coverage has required that epitopes be used specific for HLA molecules corresponding to each individual HLA allele, therefore, impractically large numbers of epitopes would have to be used in order to cover ethnically diverse populations. There has existed a need to develop peptide epitopes that are bound by multiple HLA antigen molecules for use in epitope-based vaccines. The greater the number of HLA antigen molecules bound, the greater the breadth of population coverage by the vaccine.

[0016] Furthermore, as described herein in greater detail, a need has existed to modulate peptide binding properties, for example so that peptides that are able to bind to multiple HLA antigens do so with an affinity that will stimulate an immune response. Identification of epitopes restricted by more than one HLA allele at an affinity that correlates with immunogenicity is important to provide thorough population coverage, and to allow the elicitation of responses of sufficient vigor whereby the natural immune responses noted in self-limiting acute hepatitis, or of spontaneous clearance of chronic HBV infection is induced in a diverse segment of the population. Such a response can also target a broad array of epitopes. The technology disclosed herein provides for such favored immune responses.

[0017] The information provided in this section is intended to disclose the presently understood state of the art as of the filing date of the present application. Information is included in this section which was generated subsequent to the priority date of this application. Accordingly, background in this section is not intended, in any way, to delineate the priority date for the invention.

### BRIEF SUMMARY OF THE INVENTION

[0018] This invention applies our knowledge of the mechanisms by which antigen is recognized by T cells, for example, to develop epitope-based vaccines directed towards HBV. More specifically, this application communicates our discovery of specific epitope pharmaceutical compositions and methods of use in the prevention and treatment of HBV infection.

[0019] Upon development of appropriate technology, the use of epitope-based vaccines has several advantages over current vaccines, particularly when compared to the use of whole antigens in vaccine compositions. There is evidence that the immune response to whole antigens is directed largely toward variable regions of the antigen, allowing for immune escape due to mutations. The epitopes for inclusion in an epitope-based vaccine are selected from conserved regions of viral or tumor-associated antigens, which thereby reduces the likelihood of escape mutants. Furthermore, immunosuppressive epitopes that may be present in whole antigens can be avoided with the use of epitope-based vaccines.

[0020] An additional advantage of an epitope-based vaccine approach is the ability to combine selected epitopes (CTL and HTL), and further, to modify the composition of the epitopes, achieving, for example, enhanced immunogenicity. Accordingly, the immune response can be modulated, as appropriate, for the target disease. Similar engineering of the response is not possible with traditional approaches.

[0021] Another major benefit of epitope-based immune-stimulating vaccines is their safety. The possible pathological side effects caused by infectious agents or whole protein antigens, which might have their own intrinsic biological activity, is eliminated.

[0022] An epitope-based vaccine also provides the ability to direct and focus an immune response to multiple selected antigens from the same pathogen. Thus, patient-by-patient variability in the immune response to a particular pathogen may be alleviated by inclusion of epitopes from multiple antigens from that pathogen in a vaccine composition. A “pathogen” may be an infectious agent or a tumor associated molecule.

[0023] One of the most formidable obstacles to the development of broadly efficacious epitope-based immunotherapeutics, however, has been the extreme polymorphism of HLA molecules. To date, effective non-genetically biased coverage of a population has been a task of considerable complexity; such coverage has required that epitopes be used specific for HLA molecules corresponding to each individual HLA allele, therefore, impractically large numbers of epitopes would have to be used in order to cover ethnically diverse populations. Thus, there has existed a need to develop peptide epitopes that are bound by multiple HLA antigen molecules for use in epitope-based vaccines. The greater the number of HLA antigen molecules bound, the greater the breadth of population coverage by the vaccine.

[0024] Furthermore, as described herein in greater detail, a need has existed to modulate peptide binding properties, for example, so that peptides that are able to bind to multiple HLA antigens do so with an affinity that will stimulate an immune response. Identification of epitopes restricted by more than one HLA allele at an affinity that correlates with immunogenicity is important to provide thorough population coverage, and to allow the elicitation of responses of sufficient vigor to prevent or clear an infection in a diverse segment of the population. Such a response can also target a broad array of epitopes. The technology disclosed herein provides for such favored immune responses.

[0025] In a preferred embodiment, epitopes for inclusion in vaccine compositions of the invention are selected by a process whereby protein sequences of known antigens are evaluated for the presence of motif or supermotif-bearing epitopes. Peptides corresponding to a motif- or supermotif-bearing epitope are then synthesized and tested for the ability to bind to the HLA molecule that recognizes the selected motif. Those peptides that bind at an intermediate or high affinity i.e., an IC₅₀ (or a K_{D} value) of 500 nM or less for HLA class I molecules or 1000 nM or less for HLA class II molecules, are further evaluated for their ability to induce a CTL or HTL response. Immunogenic peptides are selected for inclusion in vaccine compositions.

[0026] Supermotif-bearing peptides may additionally be tested for the ability to bind to multiple alleles within the HLA supertype family. Moreover, peptide epitopes may be analogued to modify binding affinity and/or the ability to bind to multiple alleles within an HLA supertype.

[0027] The invention also includes an embodiment comprising a method for monitoring immunogenic activity of a vaccine for HBV in a patient having a known HLA-type, the method comprising incubating a T lymphocyte sample from the patient with a peptide composition comprising an HBV epitope consisting essentially of an amino acid sequence described in Tables VI to Table XX or Table XXII which binds the product of at least one HLA allele present in said patient, and detecting for the presence of a T lymphocyte that binds to the peptide. In a preferred embodiment, the peptide comprises a tetrameric complex.

[0028] An alternative modality for defining the peptides in accordance with the invention is to recite the physical properties, such as length; primary, potentially secondary and/or tertiary structure; or charge, which are correlated with binding to a particular allele-specific HLA molecule or group of allele-specific HLA molecules. A further modality for defining peptides is to recite the physical properties of an HLA binding pocket, or properties shared by several allele-specific HLA binding pockets (e.g. pocket configuration and charge distribution) and reciting that the peptide fits and binds to said pocket or pockets.

[0029] As will be apparent from the discussion below, other methods and embodiments are also contemplated. Further, novel synthetic peptides produced by any of the methods described herein are also part of the invention.

### BRIEF DESCRIPTION OF THE FIGURES

[0030] FIG. 1: FIG. 1 provides a graph of total frequency of genotypes as a function of the number of HBV candidate epitopes bound by HLA-A and B molecules, in an average population.

[0031] FIG. 2: FIG. 2 Illustrates the Position of Peptide Epitopes in Experimental Model Minigene Constructs

### DETAILED DESCRIPTION OF THE INVENTION

[0032] peptides and corresponding nucleic acid compositions of the present invention are useful for stimulating an immune response to HBV either by stimulating the production of CTL or HTL responses. The peptides, which are derived directly or indirectly from native HBV amino acid sequences, are able to bind to HLA molecules and stimulate an immune response to HBV. The complete polyprotein sequence from HBV and its variants can be obtained from Genbank. Peptides can also be readily determined from sequence information that may subsequently be discovered for heretofore unknown variants of HBV as will be clear from the disclosure provided below.

[0033] The peptides of the invention have been identified in a number of ways, as will be discussed below. Further, analog peptides have been derived and the binding activity for H HLA molecules modulated by modifying specific amino acid residues to create peptide analogs exhibiting altered immunogenicity. Further, the present invention provides compositions and combinations of compositions that enable epitope-based vaccines that are capable of interacting with multiple HLA antigens to provide broader population coverage than prior vaccines.

A. Definitions

[0034] The invention can be better understood with reference to the following definitions, which are listed alphabetically.

[0035] A “computer” or “computer system” generally includes: a processor; at least one information storage/retrieval apparatus such as, for example, a hard drive, a disk drive or a tape drive; at least one input apparatus such as, for example, a keyboard, a mouse, a touch screen, or a microphone; and display structure. Additionally, the computer may include a communication channel in communication with a network. Such a computer may include more or less than what is listed above.

[0036] A “construct” as used herein generally denotes a composition that does not occur in nature. A construct can be produced by synthetic technologies, e.g., recombinant DNA preparation and expression or chemical synthetic techniques for nucleic or amino acids. A construct can also be produced by the addition or affiliation of one material with another such that the result is not found in nature in that form.

[0037] “Cross-reactive binding” indicates that a peptide is bound by more than one HLA molecule; a synonym is degenerate binding.

[0038] A “cryptic epitope” elicits a response by immunization with an isolated peptide, but the response is not cross-reactive in vitro when intact whole protein which comprises the epitope is used as an antigen.

[0039] A “dominant epitope” is an epitope that induces an immune response upon immunization with a whole native antigen (see, e.g., Sercarz, et al., Annu. Rev. Immunol. 11:729-766, 1993). Such a response is cross-reactive in vitro with an isolated peptide epitope.

[0040] With regard to a particular amino acid sequence, an “epitope” is a set of amino acid residues which is involved in recognition by a particular immunoglobulin, or in the context of T cells, those residues necessary for recognition by T cell receptor (TCR) proteins and/or Major Histocompatibility Complex (MHC) receptors. In an immune system setting, in vivo or in vitro, an epitope is the collective features of a molecule, such as primary, secondary and tertiary peptide structure, and charge, that together form a site recognized by an immunoglobulin, TCR or HLA molecule. Throughout this disclosure epitope and peptide are often used interchangeably.

[0041] It is to be appreciated that protein or peptide molecules that comprise an epitope of the invention as well as additional amino acid(s) are still within the bounds of the invention. In certain embodiments, there is a limitation on the length of a peptide of the invention which is not otherwise a construct. An embodiment that is length-limited occurs when the protein/peptide comprising an epitope of the invention comprises a region (i.e., a contiguous series of amino acids) having 100% identity with a native sequence. In order to avoid the definition of epitope from reading, e.g., on whole natural molecules, there is a limitation on the length of any region that has 100% identity with a native peptide sequence. Thus, for a peptide comprising an epitope of the invention and a region with 100% identity with a native peptide sequence (and is not otherwise a construct), the region with 100% identity to a native sequence generally has a length of: less than or equal to 600 amino acids, often less than or equal to 500 amino acids, often less than or equal to 400 amino acids, often less than or equal to 250 amino acids, often less than or equal to 100 amino acids, often less than or equal to 85 amino acids, often less than or equal to 75 amino acids, often less than or equal to 65 amino acids, and often less than or equal to 50 amino acids. In certain embodiments, an “epitope” of the invention is comprised by a peptide having a region with less than 51 amino acids that has 100% identity to a native peptide sequence, in any increment of (49, 48, 47, 46, 45, 44, 43, 42, 41, 40, 39, 38, 37, 36, 35, 34, 33, 32, 31, 30, 29, 28, 27, 26, 25, 24, 23, 22, 21, 20, 19, 18, 17, 16, 15, 14, 13, 12, 11, 10, 9, 8, 7, 6, 5) down to 5 amino acids.

[0042] Accordingly, peptide or protein sequences longer than 600 amino acids are within the scope of the invention, so long as they do not comprise any contiguous sequence of more than 600 amino acids that have 100% identity with a native peptide sequence, if they are not otherwise a construct. For any peptide that has five contiguous residues or less that correspond to a native sequence, there is no limitation on the maximal length of that peptide in order to fall within the scope of the invention. It is presently preferred that a CTL epitope be less than 600 residues long in any increment down to eight amino acid residues.

[0043] “Human Leukocyte Antigen” or “HLA” is a human class I or class II Major Histocompatibility Complex (MHC) protein (see, Stites, et al., Immunology, 8th Ed., Lange Publishing, Los Altos, Calif. (1994).

[0044] An “HLA supertype or family”, as used herein, describes sets of HLA molecules grouped on the basis of shared peptide-binding specificities. HLA class I molecules that share somewhat similar binding affinity for peptides bearing certain amino acid motifs are grouped into HLA supertypes. The terms HLA superfamily, HLA supertype family, and HLA xx-like supertype molecules (where xx denotes a particular HLA type) are synonyms.

[0045] Throughout this disclosure, results are expressed in terms of “IC₅₀'s.” IC₅₀ is the concentration of peptide in a binding assay at which 50% inhibition of binding of a reference peptide is observed. Given the conditions in which the assays are run (i.e., limiting HLA proteins and labeled peptide concentrations), these values approximate KD values. Assays for determining binding are described in detail, e.g., in PCT publications WO 94/20127 and WO 94/03205. It should be noted that IC₅₀ values can change, often dramatically, if the assay conditions are varied, and depending on the particular reagents used (e.g., HLA preparation, etc.). For example, excessive concentrations of HLA molecules will increase the apparent measured IC₅₀ of a given ligand.

[0046] Alternatively, binding is expressed relative to a reference peptide. Although as a particular assay becomes more, or less, sensitive, the IC₅₀'s of the peptides tested may change somewhat, the binding relative to the reference peptide will not significantly change. For example, in an assay run under conditions such that the IC₅₀ of the reference peptide increases 10-fold, the IC₅₀ values of the test peptides will also shift approximately 10-fold. Therefore, to avoid ambiguities, the assessment of whether a peptide is a good, intermediate, weak, or negative binder is generally based on its IC₅₀, relative to the IC₅₀ of a standard peptide.

[0047] Binding can also be determined using other assay systems including those using: live cells (e.g., Ceppellini et al., Nature 339:392, 1989; Christnick et al., Nature 352:67, 1991; Busch et al., Immunol. 2:443, 1990; Hill et al., J. Immunol. 147:189, 1991; del Guercio et al., J. Immunol. 154:685, 1995), cell free systems using detergent lysates (e.g., Cerundolo et al., J. Immunol. 21:2069, 1991), immobilized purified MHC (e.g., Hill et al., J. Immunol. 152, 2890, 1994; Marshall et al., J. Immunol. 152:4946, 1994), ELISA systems (e.g., Reay et al., EMBO J. 11:2829, 1992), surface plasmon resonance (e.g., Khilko et al., J. Biol. Chem. 268:15425, 1993); high flux soluble phase assays (Hammer et al., J. Exp. Med. 180:2353, 1994), and measurement of class I MHC stabilization or assembly (e.g., Ljunggren et al., Nature 346:476, 1990; Schumacher et al., Cell 62:563, 1990; Townsend et al., Cell 62:285, 1990; Parker et al., J. Immunol. 149:1896, 1992).

[0048] As used herein, “high affinity” with respect to HLA class I molecules is defined as binding with an IC₅₀, or K_{D} value, of 50 nM or less; “intermediate affinity” is binding with an IC₅₀ or K_{D} value of between about 50 and about 500 nM. “High affinity” with respect to binding to HLA class II molecules is defined as binding with an IC₅₀ or K_{D} value of 100 nM or less; “intermediate affinity” is binding with an IC₅₀ or K_{D} value of between about 100 and about 1000 nM.

[0049] The terms “identical” or percent “identity,” in the context of two or more peptide sequences, refer to two or more sequences or subsequences that are the same or have a specified percentage of amino acid residues that are the same, when compared and aligned for maximum correspondence over a comparison window, as measured using a sequence comparison algorithms or by manual alignment and visual inspection.

[0050] An “immunogenic peptide” or “peptide epitope” is a peptide that comprises an allele-specific motif or supermotif such that the peptide will bind an HLA molecule and induce a CTL and/or HTL response. Thus, immunogenic peptides of the invention are capable of binding to an appropriate HLA molecule and thereafter inducing a cytotoxic T cell response, or a helper T cell response, to the antigen from which the immunogenic peptide is derived.

[0051] The phrases “isolated” or “biologically pure” refer to material which is substantially or essentially free from components which normally accompany the material as it is found in its native state. Thus, isolated peptides in accordance with the invention preferably do not contain materials normally associated with the peptides in their in situ environment.

[0052] “Link” or “join” refers to any method known in the art for functionally connecting peptides, including, without limitation, recombinant fusion, covalent bonding, disulfide bonding, ionic bonding, hydrogen bonding, and electrostatic bonding.

[0053] “Major Histocompatibility Complex” or “MHC” is a cluster of genes that plays a role in control of the cellular interactions responsible for physiologic immune responses. In humans, the MHC complex is also known as the HLA complex. For a detailed description of the MHC and HLA complexes, see, Paul, Fundamental Immunology, 3rd Ed., Raven Press, New York, 1993.

[0054] The term “motif” refers to the pattern of residues in a peptide of defined length, usually a peptide of from about 8 to about 13 amino acids for a class I HLA motif and from about 6 to about 25 amino acids for a class II HLA motif, which is recognized by a particular HLA molecule. Peptide motifs are typically different for each protein encoded by each human HLA allele and differ in the pattern of the primary and secondary anchor residues.

[0055] A “negative binding residue” or “deleterious residue” is an amino acid which, if present at certain positions (typically not primary anchor positions) of a peptide epitope, results in decreased binding affinity of the peptide for the peptide's corresponding HLA molecule. Any residue that is not “deleterious” is a “non-deleterious” residue.

[0056] A “non-native” sequence or “construct” refers to a sequence that is not found in nature, i.e., is “non-naturally occurring”. Such sequences include, e.g., peptides that are lipidated or otherwise modified, and polyepitopic compositions that contain epitopes that are not contiguous in a native protein sequence.

[0057] The term “peptide” is used interchangeably with “oligopeptide” in the present specification to designate a series of residues, typically 1-amino acids, connected one to the other, typically by peptide bonds between the α-amino and carboxyl groups of adjacent amino acids. In some embodiments, the preferred CTL-inducing oligopeptides of the invention are 13 residues or less in length and usually consist of between about 8 and about 11 residues, preferably 9 or 10 residues. In some embodiments, the preferred HTL-inducing oligopeptides are less than about 50 residues in length and usually consist of between about 6 and about 30 residues, more usually between about 12 and 25, and often between about 15 and 20 residues.

[0058] “Pharmaceutically acceptable” refers to a generally non-toxic, inert, and physiologically compatible composition.

[0059] A “primary anchor residue” is an amino acid at a specific position along a peptide sequence which is understood to provide a contact point between the immunogenic peptide and the HLA molecule. One to three, usually two, primary anchor residues within a peptide of defined length generally defines a “motif” for an immunogenic peptide. These residues are understood to fit in close contact with peptide binding grooves of an HLA molecule, with their side chains buried in specific pockets of the binding grooves themselves. In one embodiment, the primary anchor residues are located at position 2 (from the amino terminal position) and at the carboxyl terminal position of a 9 residue peptide in accordance with the invention. The primary anchor positions for each motif and supermotif are set forth in Table I. For example, analog peptides can be created by altering the presence or absence of particular residues in these primary anchor positions. Such analogs are used to finely modulate the binding affinity of a peptide comprising a particular motif or supermotif.

[0060] “Promiscuous recognition” is where a distinct peptide is recognized by the same T cell clone in the context of multiple HLA molecules. Promiscuous binding is synonymous with cross-reactive binding.

[0061] A “protective immune response” or “therapeutic immune response” refers to a CTL and/or an HTL response to an antigen derived from an infectious agent or a tumor antigen, which prevents or at least partially arrests disease symptoms or progression. The immune response may also include an antibody response which has been facilitated by the stimulation of helper T cells.

[0062] The term “residue” refers to an amino acid or amino acid mimetic incorporated into an oligopeptide by an amide bond or amide bond mimetic.

[0063] A “secondary anchor residue” is an amino acid at a position other than a primary anchor position in a peptide which may influence peptide binding. A secondary anchor residue occurs at a significantly higher frequency amongst bound peptides than would be expected by random distribution of amino acids at one position. The secondary anchor residues are said to occur at “secondary anchor positions.” A secondary anchor residue can be identified as a residue which is present at a higher frequency among high affinity binding peptides, or a residue otherwise associated with high affinity binding. For example, analog peptides can be created by altering the presence or absence of particular residues in these secondary anchor positions. Such analogs are used to finely modulate the binding affinity of a peptide comprising a particular motif or supermotif.

[0064] A “subdominant epitope” is an epitope which evokes little or no response upon immunization with whole antigens which comprise the epitope, but for which a response can be obtained by immunization with an isolated peptide, and this response (unlike the case of cryptic epitopes) is detected when whole protein is used to recall the response in vitro or in vivo.

[0065] A “supermotif” is a peptide binding specificity shared by HLA molecules encoded by two or more HLA alleles. A supermotif-bearing epitope is preferably is recognized with high or intermediate affinity (as defined herein) by two or more HLA antigens.

[0066] “Synthetic peptide” refers to a peptide that is man-made using such methods as chemical synthesis or recombinant DNA technology.

[0067] As used herein, a “vaccine” is a composition that contains one or more peptides of the invention. There are numerous embodiments of vaccines in accordance with the invention, such as by a cocktail of one or more peptides; one or more epitopes of the invention comprised by a polyepitopic peptide; or nucleic acids that encode such peptides or polypeptides, e.g., a minigene that encodes a polyepitopic peptide. The “one or more peptides” can include any whole unit integer from 1-150, e.g., at least 2, 3, 4, 5, 6, 7, 8, 9, 10, 11, 12, 13, 14, 15, 16, 17, 18, 19, 20, 21, 22, 23, 24, 25, 26, 27, 28, 29, 30, 31, 32, 33, 34, 35, 36, 37, 38, 39, 40, 45, 50, 55, 60, 65, 70, 75, 80, 85, 90, 95, 100, 105, 110, 115, 120, 125, 130, 135, 140, 145, or 150 or more peptides of the invention. The peptides or polypeptides can optionally be modified, such as by lipidation, addition of targeting or other sequences. HLA class I-binding peptides of the invention can be admixed with, or linked to, HLA class II-binding peptides, to facilitate activation of both cytotoxic T lymphocytes and helper T lymphocytes. Vaccines can also comprise peptide-pulsed antigen presenting cells, e.g., dendritic cells.

[0068] The nomenclature used to describe peptide compounds follows the conventional practice wherein the amino group is presented to the left (the N-terminus) and the carboxyl group to the right (the C-terminus) of each amino acid residue. When amino acid residue positions are referred to in a peptide epitope they are numbered in an amino to carboxyl direction with position one being the position closest to the amino terminal. In the formulae representing selected specific embodiments of the present invention, the amino- and carboxyl-terminal groups, although not specifically shown, are in the form they would assume at physiologic pH values, unless otherwise specified. In the amino acid structure formulae, each residue is generally represented by standard three letter or single letter designations. The 1-form of an amino acid residue is represented by a capital single letter or a capital first letter of a three-letter symbol, and the d-form for those amino acids having d-forms is represented by a lower case single letter or a lower case three letter symbol. Glycine has no asymmetric carbon atom and is simply referred to as “Gly” or G. Symbols for the amino acids are shown below.

| Single Letter Symbol | Three Letter Symbol | Amino Acids |
|---|---|---|
| A | Ala | Alanine |
| C | Cys | Cysteine |
| D | Asp | Aspartic Acid |
| E | Glu | Glutamic Acid |
| F | Phe | Phenylalanine |
| G | Gly | Glycine |
| H | His | Histidine |
| I | Ile | Isoleucine |
| K | Lys | Lysine |
| L | Leu | Leucine |
| M | Met | Methionine |
| N | Asn | Asparagine |
| P | Pro | Proline |
| Q | Gln | Glutamine |
| R | Arg | Arginine |
| S | Ser | Serine |
| T | Thr | Threonine |
| V | Val | Valine |
| W | Trp | Tryptophan |
| Y | Tyr | Tyrosine |

B. Stimulation of CTL and HTL Responses Against HBV

[0069] The mechanism by which T cells recognize antigens has been delineated during the past ten years. Based on our new understanding of the immune system we have generated efficacious peptide epitope vaccine compositions that can induce a therapeutic or prophylactic immune response to HBV infection in a broad population. For an understanding of the value and efficacy of the claimed compositions, a brief review of the technology is provided.

[0070] A complex of an HLA molecule and a peptidic antigen acts as the ligand recognized by HLA-restricted T cells (Buus, S. et al., Cell 47:1071, 1986; Babbitt, B. P. et al., Nature 317:359, 1985; Townsend, A. and Bodmer, H., Annu. Rev. Immunol. 7:601, 1989; Germain, R. N., Annu. Rev. Immunol. 11:403, 1993). Through the study of single amino acid substituted antigen analogs and the sequencing of endogenously bound, naturally processed peptides, critical residues that correspond to motifs required for specific binding to HLA antigen molecules have been identified and are described herein and are set forth in Tables I, II, and III (see also, e.g., Southwood, et al., J. Immunol. 160:3363, 1998; Rammensee, et al., Immunogenetics 41:178, 1995; Rammensee et al., SYFPEITHI, access via web at: http://134.2.96.221/scripts.hlaserver.dll/home.htm; Sette, A. and Sidney, J. Curr. Opin. Immunol. 10:478, 1998; Engelhard, V. H., Curr. Opin. Immunol. 6:13, 1994; Sette, A. and Grey, H. M., Curr. Opin. Immunol. 4:79, 1992; Sinigaglia, F. and Hammer, J. Curr. Biol. 6:52, 1994; Ruppert et al., Cell 74:929-937, 1993; Kondo et al., J. Immunol. 155:4307-4312, 1995; Sidney et al., J. Immunol. 157:3480-3490, 1996; Sidney et al., Human Immunol. 45:79-93, 1996; Sette, A. and Sidney, J. Immunogenetics, in press, 1999).

[0071] Furthermore, x-ray crystallographic analysis of HLA-peptide complexes has revealed pockets within the peptide binding cleft of HLA molecules which accommodate, in an allele-specific mode, residues borne by peptide ligands; these residues in turn determine the HLA binding capacity of the peptides in which they are present. (See, e.g., Madden, D. R. Annu. Rev. Immunol. 13:587, 1995; Smith, et al., Immunity 4:203, 1996; Fremont et al., Immunity 8:305, 1998; Stern et al., Structure 2:245, 1994; Jones, E. Y. Curr. Opin. Immunol. 9:75, 1997; Brown, J. H. et al., Nature 364:33, 1993; Guo, H. C. et al., Proc. Natl. Acad. Sci. USA 90:8053, 1993; Guo, H. C. et al., Nature 360:364, 1992; Silver, M. L. et al., Nature 360:367, 1992; Matsumura, M. et al., Science 257:927, 1992; Madden et al., Cell 70:1035, 1992; Fremont, D. H. et al., Science 257:919, 1992; Saper, M. A., Bjorkman, P. J. and Wiley, D. C., J. Mol. Biol. 219:277, 1991.)

[0072] Accordingly, the definition of class I and class II allele-specific HLA binding motifs or class I supermotifs allows identification of regions within a protein that have the potential of binding particular HLA antigens (see also e.g., Sette, A. and Grey, H. M., Curr. Opin. Immunol. 4:79, 1992; Sinigaglia, F. and Hammer, J., Curr. Biol. 6:52, 1994; Engelhard, V. H., Curr. Opin. Immunol. 6:13, 1994; Kast, W. M. et al., J. Immunol., 152:3904, 1994).

[0073] Furthermore, a variety of assays to quantify the affinity of interaction between peptide and HLA have also been established. Such assays include, for example, measures of IC₅₀ values, inhibition of antigen presentation (Sette et al., J. Immunol. 141:3893, 1991), in vitro assembly assays (Townsend et al., Cell 62:285, 1990), measures of dissociations rates (Parker et al., J. Immunol. 149:1896-1904, 1992), and FACS-based assays using mutated cells, such as RMA.S (Melief, et al., Eur. J. Immunol. 21:2963, 1991).

[0074] The present inventors have found that the correlation of binding affinity with immunogenicity is an important factor to be considered when evaluating candidate peptides. Thus, by a combination of motif searches and HLA-peptide binding assays, candidates for epitope-based vaccines have been identified. After determining their binding affinity, additional confirmatory work can be performed to select, amongst these vaccine candidates, epitopes with preferred characteristics in terms of antigenicity and immunogenicity. Various strategies can be utilized to evaluate immunogenicity, including:

[0075] 1) Evaluation of primary T cell cultures from normal individuals (Wentworth, P. A. et al., Mol. Immunol. 32:603, 1995; Celis, E. et al., Proc. Natl. Acad. Sci. USA 91:2105, 1994; Tsai, V. et al., J. Immunol. 158:1796, 1997; Kawashima, I. et al., Human Immunol. 59:1, 1998); This procedure involves the stimulation of PBL from normal subjects with a test peptide in the presence of antigen presenting cells in vitro over a period of several weeks. T cells specific for the peptide become activated during this time and are detected using a ⁵¹Cr-release assay involving peptide sensitized target cells.

[0076] 2) Immunization of HLA transgenic mice (Wentworth, P. A. et al., J. Immunol. 26:97, 1996; Wentworth, P. A. et al., Int. Immunol. 8:651, 1996; Alexander, J. et al., J. Immunol. 159:4753, 1997); In this method, peptides in incomplete Freund's adjuvant are administered subcutaneously to HLA transgenic mice. Several weeks following immunization, splenocytes are removed and cultured in vitro in the presence of test peptide for approximately one week. Peptide-specific T cells are detected using a ⁵¹Cr-release assay involving peptide sensitized target cells and target cells expressing endogenously generated antigen.

[0077] 3) Demonstration of recall T cell responses from immune individuals who have recovered from infection, and/or from chronically infected patients (Rehermann, B. et al., J. Exp. Med. 181:1047, 1995; Doolan, D. L. et al., Immunity 7:97, 1997; Bertoni, R. et al., J. Clin. Invest. 100:503, 1997; Threlkeld, S. C. et al., J. Immunol. 159:1648, 1997; Diepolder, H. M. et al., J. Virol. 71:6011, 1997). In applying this strategy, recall responses were detected by culturing PBL from subjects that had been naturally exposed to the antigen, for instance through infection, and thus had generated an immune response “naturally”. PBL from subjects were cultured in vitro for 1-2 weeks in the presence of test peptide plus antigen presenting cells (APC) to allow activation of “memory” T cells, as compared to “naive” Tcells. At the end of the culture period, T cell activity is detected using assays for T cell activity including ⁵¹Cr release involving peptide-sensitized targets, T cell proliferation or lymphokine release.

[0078] The following describes the peptide epitopes and corresponding nucleic acids of the invention.

C. Binding Affinity of Peptide Epitopes for HLA Molecules

[0079] As indicated herein, the large degree of HLA polymorphism is an important factor to be taken into account with the epitope-based approach to vaccine development. To address this factor, epitope selection encompassing identification of peptides capable of binding at high or intermediate affinity to multiple HLA molecules is preferably utilized, most preferably these epitopes bind at high or intermediate affinity to two or more allele specific HLA molecules.

[0080] CTL-inducing peptides of interest for vaccine compositions preferably include those that have an IC₅₀ or binding affinity value for class I HLA molecules of 500 nM or less. HTL-inducing peptides preferably include those that have an IC₅₀ or binding affinity value for class II HLA molecules of 1000 nM or less. For example, peptide binding is assessed by testing the capacity of a candidate peptide to bind to a purified HLA molecule in vitro. Peptides exhibiting high or intermediate affinity are then considered for further analysis. Selected peptides are tested on other members of the supertype family. In preferred embodiments, peptides that exhibit cross-reactive binding are then used in vaccines or in cellular screening analyses.

[0081] As disclosed herein, high HLA binding affinity is correlated with greater immunogenicity. Greater immunogenicity can be manifested in several different ways. Immunogenicity corresponds to whether an immune response is elicited at all, and to the vigor of any particular response. For example, a peptide might elicit an immune response in a diverse array of the population, yet in no instance produce a vigorous response. In accordance with these principles, close to 90% of high binding peptides have been found to be immunogenic, as contrasted with about 50% of the peptides which bind with intermediate affinity. Moreover, higher binding affinity peptides leads to more vigorous immunogenic responses. As a result, less peptide is required to elicit a similar biological effect if a high affinity binding peptide is used. Thus, in preferred embodiments of the invention, high binding epitopes are particularly desired.

[0082] The relationship between binding affinity for HLA class I molecules and immunogenicity of discrete peptide epitopes on bound antigens has been determined for the first time in the art by the present inventors. The correlation between binding affinity and immunogenicity was analyzed in two different experimental approaches (Sette, et al., J. Immunol. 153:5586-5592, 1994). In the first approach, the immunogenicity of potential epitopes ranging in HLA binding affinity over a 10,000-fold range was analyzed in HLA-A*0201 transgenic mice. In the second approach, the antigenicity of approximately 100 different hepatitis B virus (HBV)-derived potential epitopes, all carrying A*0201 binding motifs, was assessed by using PBL (peripheral blood lymphocytes) of acute hepatitis patients. Pursuant to these approaches, it was determined that an affinity threshold of approximately 500 nM (preferably an IC₅₀ value of 500 nM or less) determines the capacity of a peptide epitope to elicit a CTL response. These data are true for class I binding affinity measurements for naturally processed peptides and for synthesized T cell epitopes. These data also indicate the important role of determinant selection in the shaping of T cell responses.

[0083] An affinity threshold associated with immunogenicity in the context of HLA class II DR molecules has also been delineated (Southwood et al. J. Immunology 160:3363-3373,1998, and U.S. Ser. No. 60/087192 filed May 29, 1998). In order to define a biologically significant threshold of DR binding affinity, a database of the binding affinities of 32 DR-restricted epitopes for their restricting element was compiled. In approximately half of the cases (15 of 32 epitopes), DR restriction was associated with high binding affinities, i.e., binding affinities of with an IC₅₀ value of 100 nM or less. In the other half of the cases (16 of 32), DR restriction was associated with intermediate affinity (binding affinities in the 100-1000 nM range). In only one of 32 cases was DR restriction associated with an IC₅₀ of 1000 nM or greater. Thus, 1000 nM can be defined as an affinity threshold associated with immunogenicity in the context of DR molecules.

[0084] The binding affinity of peptides for HLA molecules can be determined as described in Example 1, below.

D. Peptide Epitope Binding Motifs and Supermotifs

[0085] In the past few years evidence has accumulated to demonstrate that a large fraction of HLA class I, and possibly class II molecules can be classified into a relatively few supertypes characterized by largely overlapping peptide binding repertoires, and consensus structures of the main peptide binding pockets.

[0086] For HLA molecule pocket analyses, the residues comprising the B and F pockets of HLA class I molecules as described in crystallographic studies (Guo, H. C. et al., Nature 360:364, 1992; Saper, M. A. , Bjorkman, P. J. and Wiley, D. C., J. Mol. Biol. 219:277, 1991; Madden, D. R., Garboczi, D. N. and Wiley, D. C., Cell 75:693, 1993), have been compiled from the database of Parham, et al. (Parham, P., Adams, E. J., and Arnett, K. L., Immunol. Rev. 143:141, 1995). In these analyses, residues 9, 45, 63, 66, 67, 70, and 99 were considered to make up the B pocket, and to determine the specificity for the residue in the second position of peptide ligands. Similarly, residues 77, 80, 81, and 116 were considered to determine the specificity of the F pocket, and to determine the specificity for the C-terminal residue of a peptide ligand bound by the HLA molecule.

[0087] Through the study of single amino acid substituted antigen analogs and the sequencing of endogenously bound, naturally processed peptides, critical residues required for allele-specific binding to HLA molecules have been identified. The presence of these residues correlates with binding affinity for HLA molecules. The identification of motifs and/or supermotifs that correlate with high and intermediate affinity binding is an important issue with respect to the identification of immunogenic peptide epitopes for the inclusion in a vaccine. Kast et al. (J. Immunol. 152:3904-3912, 1994) have shown that motif-bearing peptides account for 90% of the epitopes that bind to allele-specific HLA class I molecules. In this study all possible peptides of 9 amino acids in length and overlapping by eight amino acids (240 peptides), which cover the entire sequence of the E6 and E7 proteins of human papillomavirus type 16, were evaluated for binding to five allele-specific HLA molecules that are expressed at high frequency among different ethnic groups. This unbiased set of peptides allowed an evaluation of the predictive value of HLA class I motifs. From the set of 240 peptides, 22 peptides were identified that bound to an allele-specific HLA molecules with high or intermediate affinity. Of these 22 peptides, 20, (i.e. 91%), were motif-bearing. Thus, this study demonstrates the value of motifs for the identification of peptide epitopes for inclusion in a vaccine: application of motif-based identification techniques eliminates screening of 90% of the potential epitopes.

[0088] Such peptide epitopes are identified in the Tables described below. The Tables for the HLA class I epitopes include over 90% of the peptides that will bind to an allele-specific HLA class I molecule with intermediate or high affinity.

[0089] Peptides of the present invention may also include epitopes that bind to MHC class II DR molecules. A significant difference between class I and class II HLA molecules is that, although a stringent size restriction exists for peptide binding to class I molecules, a greater degree of heterogeneity in both sizes and binding frame positions of the motif, relative to the N and C termini of the peptide, can be demonstrated for class II peptide ligands. This increased heterogeneity is due to the structure of the class II-binding groove which, unlike its class I counterpart, is open at both ends. Crystallographic analysis of DRB*0101-peptide complexes (see, e.g., Madden, D. R. Ann. Rev. Immunol. 13:587, 1995) showed that the residues occupying position 1 and position 6 of peptides complexed with DRB*0101 engage two complementary pockets on the DRBa*0101 molecules, with the P1 position corresponding to the most crucial anchor position as a crucial anchor residue for binding to various other DR molecules.

[0090] Thus, peptides of the present invention are identified by any one of several HLA-specific amino acid motifs(see, e.g., Tables I-III). If the presence of the motif corresponds to the ability to bind several allele-specific HLA antigens it is referred to as a supermotif. The allele-specific HLA molecules that bind to peptides that possess a particular amino acid supermotif are collectively referred to as an HLA “supertype.”

[0091] The peptide motifs and supermotifs described below provide guidance for the identification and use of peptides in accordance with the invention.

[0092] Examples of peptide epitopes bearing the respective supermotif or motif are included in Tables as designated in the description of each motif or supermotif. The Tables include a binding affinity ratio listing for some of the peptide epitopes. The ratio may be converted to IC₅₀ by using the following formula: IC₅₀ of the standard peptide/ratio=IC₅₀ of the test peptide (i.e. the peptide epitope). The IC₅₀ values of standard peptides used to determine binding affinities for Class I peptides are shown in Table IV. The IC₅₀ values of standard peptides used to determine binding affinities for Class II peptides are shown in Table V. The peptides used as standards for the binding assay are examples of standards; alternative standard peptides can also be used when performing such an analysis.

[0093] To obtain the peptide epitope sequences listed in each Table, protein sequence data from twenty HBV strains (HPBADR, HPBADR1CG, HPBADRA, HPBADRC, HPBADRCG, HPBCGADR, HPBVADRM, HPBADW, HPBADW1, HPBADW2, HPBADW3, HPBADWZ, HPBHEPB, HPBVADW2, HPBAYR, HPBV, HPBVAYWC, HPBVAYWCI, NAD HPBVAYWE) were evaluated for the presence of the designated supermotif or motif. Peptide epitopes were also selected on the basis of their conservancy. A criterion for conservancy requires that the entire sequence of a peptide be totally conserved in 75% of the sequences available for a specific protein. The percent conservancy of the selected peptide epitopes is indicated on the Tables. The frequency, i.e. the number of strains of the 20 strains in which the peptide sequence was identified, is also shown. The “1st position” column in the Tables designates the amino acid position of the HBV protein that corresponds to the first amino acid residue of the epitope. “Number of amino acids” indicates the number of residues in the epitope sequence.

HLA Class I Motifs Indicative of CTL Inducing Peptide Epitopes:

[0094] The primary anchor residues of the HLA class I peptide epitope supermotifs and motifs delineated below are summarized in Table I. The HLA class I motifs set out in Table I(a) are those most particularly relevant to the invention claimed here. Primary and secondary anchor positions are summarized in Table II. Allele-specific HLA molecules that comprise HLA class I supertype families are listed in Table VI.

1. HLA-A1 Supermotif

[0095] The HLA-A1 supermotif is characterized by the presence in peptide ligands of a small (T or S) or hydrophobic (L, I, V, or M) primary anchor residue in position 2, and an aromatic (Y, F, or W) primary anchor residue at the C-terminal position of the epitope. The corresponding family of HLA molecules that bind to the A1 supermotif (i.e., the HLA-A1 supertype) is comprised of at least A*0101, A*2601, A*2602, A*2501, and A*3201 (see, e.g., DiBrino, M. et al., J. Immunol. 151:5930, 1993; DiBrino, M. et al., J. Immunol. 152:620, 1994; Kondo, A. et al., Immunogenetics 45:249, 1997). Other allele-specific HLA molecules predicted to be members of the A1 superfamily are shown in Table VI. Peptides binding to each of the individual HLA proteins can be modulated by substitutions at primary and/or secondary anchor positions, preferably choosing respective residues specified for the supermotif.

[0096] Representative peptide epitopes that comprise the A1 supermotif are set forth on the attached Table VII.

2. HLA-A2 Supermotif

[0097] Primary anchor specificities for allele-specific HLA A2.1 molecules (Falk et al., Nature 351:290-296, 1991; Hunt et al., Science 255:1261-1263, 1992) and cross-reactive binding within the HLA A2 family (Fruci et al., Human Immunol. 38:187-192, 1993; Tanigaki et al., Human Immunol. 39:155-162, 1994) have been described. The present inventors have defined additional primary anchor residues that determine cross-reactive binding to multiple allele-specific HLA A2 molecules (Del Guercio et al., J. Immunol. 154:685-693, 1995). The HLA-A2 supermotif comprises peptide ligands with L, I, V, M, A, T, or Q as primary anchor residues at position 2 and L, I, V, M, A, or T as a primary anchor residue at the C-terminal position of the epitope.

[0098] The corresponding family of HLA molecules (i.e., the HLA-A2 supertype that binds these peptides) is comprised of at least: A*0201, A*0-202, A*0203, A*0204, A*0205, A*0206, A*0207, A*0209, a*0214, A*6802, and A*6901. Other allele-specific HLA molecules predicted to be members of the A2 superfamily are shown in Table VI. As explained in detail below, binding to each of the individual allele-specific HLA molecules can be modulated by substitutions at the primary anchor and/or secondary anchor positions, preferably choosing respective residues specified for the supermotif.

[0099] Representative peptide epitopes that comprise an A2 supermotif are set forth on the attached Table VIII. The motifs comprising the primary anchor residues V, A, T, or Q at position 2 and L, I, V, A, or T at the C-terminal position are those most particularly relevant to the invention claimed herein.

3. HLA-A3 Supermotif

[0100] The HLA-A3 supermotif is characterized by the presence in peptide ligands of A, L, I, V, M, S, or, T as a primary anchor at position 2, and a positively charged residue, R or K, at the C-terminal position of the epitope (e.g., in position 9 of 9-mers). Exemplary members of the corresponding family of HLA molecules (the HLA-A3 supertype) that bind the A3 supermotif include at least: A*0301, A*1101, A*3101, A*3301, and A*6801. Other allele-specific HLA molecules predicted to be members of the A3 superfamily are shown in Table VI. As explained in detail below, peptide binding to each of the individual allele-specific HLA proteins can be modulated by substitutions of amino acids at the primary and/or secondary anchor positions of the peptide, preferably choosing respective residues specified for the supermotif.

[0101] Representative peptide epitopes that comprise the A3 supermotif are set forth on the attached Table IX.

4. HLA-A24 Supermotif

[0102] The HLA-A24 supermotif is characterized by the presence in peptide ligands of an aromatic (F, W, or Y) residue as a primary anchor in position 2, and a hydrophobic (Y, F, L, I, V, or M) residue as primary anchor at the C-terminal position of the epitope. The corresponding family of HLA molecules that bind to the A24 supermotif (i.e., the A24 supertype) includes at least A*2402, A*3001, and A*2301. Other allele-specific HLA molecules predicted to be members of the A24 superfamily are shown in Table VI.Peptide binding to each of the allele-specific HLA molecules can be modulated by substitutions at primary anchor positions, preferably choosing respective residues specified for the supermotif.

[0103] Representative peptide epitopes that comprise the A24 supermotif are set forth on the attached Table X.

5. HLA-B7 Supermotif

[0104] The HLA-B7 supermotif is characterized by peptides bearing proline in position 2 as a primary anchor, and a hydrophobic or aliphatic amino acid (L, I, V, M, A, F, W, or Y) as the primary anchor at the C-terminal position of the epitope. The corresponding family of HLA molecules that bind the B7 supermotif (i.e., the HLA-B7 supertype) is comprised of at least twenty six HLA-B proteins including: B*0702, B*0703, B*0704, B*0705, B*1508, B*3501, B*3502, B*3503, B*3504, B*3505, B*3506, B*3507, B*3508, B*5101, B*5102, B*5103, B*5104, B*5105, B*5301, B*5401, B*5501, B*5502, B*5601, B*5602, B*6701, and B*7801 (see, e.g., Sidney, et al., J. Immunol. 154:247, 1995; Barber, et al., Curr. Biol. 5:179, 1995; Hill, et al., Nature 360:434, 1992; Rammensee, et al., Immunogenetics 41:178, 1995). Other allele-specific HLA molecules predicted to be members of the B7 superfamily are shown in Table VI. As explained in detail below, peptide binding to each of the individual allele-specific HLA proteins can be modulated by substitutions at the primary and/or secondary anchor positions of the peptide, preferably choosing respective residues specified for the supermotif.

[0105] Representative peptide epitopes that contain the B7 supermotif are set forth on the attached Table XI.

6. HLA-B27 Supermotif

[0106] The HLA-B27 supermotif is characterized by the presence in peptide ligands of a positively charged (R, H, or K) residue as a primary anchor at position 2, and a hydrophobic (F, Y, L, W, M, I, A, or V) residue as a primary anchor at the C-terminal position of the epitope. Exemplary members of the corresponding family of HLA molecules that bind to the B27 supermotif (i.e., the B27 supertype) include at least B*1401, B*1402, B*1509, B*2702, B*2703, B*2704, B*2705, B*2706, B*3801, B*3901, B*3902, and B*7301. Other allele-specific HLA molecules predicted to be members of the B27 superfamily are shown in Table VI. Peptide binding to each of the allele-specific HLA molecules can be modulated by substitutions at primary anchor positions, preferably choosing respective residues specified for the supermotif.

[0107] Representative peptide epitopes that comprise the B27 supermotif are set forth on the attached Table XII.

7. HLA-B44 Supermotif

[0108] The HLA-B44 supermotif is characterized by the presence in peptide ligands of negatively charged (D or E) residues as a primary anchor in position 2, and hydrophobic residues (F, W, Y, L, I, M, V, or A) as a primary anchor at the C-terminal position of the epitope. Exemplary members of the corresponding family of HLA molecules that bind to the B44 supermotif (i.e., the B44 supertype) include at least: B*1801, B*1802, B*3701, B*4001, B*4002, B*4006, B*4402, B*4403, and B*4006. Peptide binding to each of the allele-specific HLA molecules can be modulated by substitutions at primary anchor positions; preferably choosing respective residues specified for the supermotif.

8. HLA-B58 Supermotif

[0109] The HLA-B58 supermotif is characterized by the presence in peptide ligands of a small aliphatic residue (A, S, or T) as a primary anchor residue at position 2, and an aromatic or hydrophobic residue (F, W, Y, L, I, V, M, or A) as a primary anchor residue at the C-terminal position of the epitope. Exemplary members of the corresponding family of HLA molecules that bind to the B58 supermotif (i.e., the B58 supertype) include at least: B*1516, B*1517, B*5701, B*5702, and B*5801. Other allele-specific HLA molecules predicted to be members of the B58 superfamily are shown in Table VI. Peptide binding to each of the allele-specific HLA molecules can be modulated by substitutions at primary anchor positions, preferably choosing respective residues specified for the supermotif.

[0110] Representative peptide epitopes that comprise the B58 supermotif are set forth on the attached Table XIII.

9. HLA-B62 Supermotif

[0111] The HLA-B62 supermotif is characterized by the presence in peptide ligands of the polar aliphatic residue Q or a hydrophobic aliphatic residue (L, V, M, or I) as a primary anchor in position 2, and a hydrophobic residue (F, W, Y, M, I, V, L, or A) as a primary anchor at the C-terminal position of the epitope. Exemplary members of the corresponding family of HLA molecules that bind to the B62 supermotif (i.e., the B62 supertype) include at least: B*1501, B*1502, B*1513, and B5201. Other allele-specific HLA molecules predicted to be members of the B62 superfamily are shown in Table VI. Peptide binding to each of the allele-specific HLA molecules can be modulated by substitutions at primary anchor positions, preferably choosing respective residues specified for the supermotif.

[0112] Representative peptide epitopes that comprise the B62 supermotif are set forth on the attached Table XIV.

10. HLA-A1 Motif

[0113] The allele-specific HLA-A1 motif is characterized by the presence in peptide ligands of T, S, or M as a primary anchor residue at position 2 and the presence of Y as a primary anchor residue at the C-terminal position of the epitope. An alternative allele-specific A1 motif (i.e., a “submotif”) is characterized by a primary anchor residue at position 3 rather than position 2. This submotif is characterized by the presence of D, E, A, or S as a primary anchor residue in position 3, and a Y as a primary anchor residue at the C-terminal position of the epitope. An extended submotif is characterized by the presence of D in position 3 and A, I, L, or F at the C-terminus. Peptide binding to HLA A1 can be modulated by substitutions at primary and/or secondary anchor positions, preferably choosing respective residues specified for the motif.

[0114] Representative peptide epitopes that comprise either A1 motif are set forth on the attached Table XV. Those epitopes comprising T, S, or M at position 2 and Y at the C-terminal position are also included in the listing of HLA-A1 supermotif-bearing peptide epitopes listed in Table VII.

11. HLA-A2.1 Motif

[0115] An allele-specific HLA-A2.1 motif was first determined to be characterized by the presence in peptide ligands of L or M as a primary anchor residue in position 2, and L or V as a primary anchor residue at the C-terminal position of a 9 amino acid epitope (Falk et al., Nature 351:290-296, 1991). Furthermore, the A2.1 motif was determined to further comprise an I at position 2 and I or A at the C-terminal position of a nine amino acid peptide (Hunt et al., Science 255:1261-1263, Mar. 6, 1992). Additionally, the A2.1 allele-specific motif has been found to comprise a T at the C-terminal position (Kast et al., J. Immunol. 152:3904-3912, 1994). Subsequently, the A2.1 allele-specific motif has been defined by the present inventors to additionally comprise V, A, T, or Q as a primary anchor residue at position 2, and M as a primary anchor residue at the C-terminal position of the epitope. Thus, the HLA-A2.1 motif comprises peptide ligands with L, I, V, M, A, T, or Q as primary anchor residues at position 2 and L, I, V, M, A, or T as a primary anchor residue at the C-terminal position of the epitope. The preferred and tolerated residues that characterize the primary anchor positions of the HLA-A2.1 motif are identical to the preferred residues of the A2 supermotif. (for reviews of relevant data, see, e.g., Del Guercio et al., J. Immunol. 154:685-693, 1995; Sidney et al., Immunol. Today 17:261-266, 1996; Sette and Sidney, Curr. Opin. in Immunol. 10:478-482, 1998). Secondary anchor residues that characterize the A2.1 motif have additionally been defined as disclosed herein. These are disclosed in Table II. Peptide binding to HLA-A2.1 molecules can be modulated by substitutions at primary and/or secondary anchor positions, preferably choosing respective residues specified for the motif.

[0116] Representative peptide epitopes that comprise an A2.1 motif are set forth on the attached Table VII. The A2.1 motifs comprising the primary anchor residues V, A, T, or Q at position 2 and L, I, V, A, or T at the C-terminal position are those most particularly relevant to the invention claimed herein.

12. HLA-A3 Motif

[0117] The allele-specific HLA-A3 motif is characterized by the presence in peptide ligands of L, M, V, I, S, A, T, F, C, G, or D as a primary anchor residue at position 2, and the presence of K, Y, R, H, F, or A as a primary anchor residue at the C-terminal position of the epitope. Peptide binding to HLA-A3 can be modulated by substitutions at primary and/or secondary anchor positions, preferably choosing respective residues specified for the motif.

[0118] Representative peptide epitopes that comprise the A3 motif are set forth on the attached Table XVI. Those peptide epitopes that also comprise the A3 supermotif are also listed in Table IX.

13. HLA-A11 Motif

[0119] The allele-specific HLA-Al motif is characterized by the presence in peptide ligands of V, T, M, L, I, S, A, G, N, C, D, or F as a primary anchor residue in position 2, and K, R, Y, or H as a primary anchor residue at the C-terminal position of the epitope. Peptide binding to HLA-A11 can be modulated by substitutions at primary and/or secondary anchor positions, preferably choosing respective residues specified for the motif.

[0120] Representative peptide epitopes that comprise the A11 motif are set forth on the attached Table XVII; peptide epitopes comprising the A3 allele-specific motif are also present in this Table because of the extensive overlap between the A3 and A11 motif primary anchor specificities. Further, those peptide epitopes that comprise the A3 supermotif are also listed in Table IX.

14. HLA-A24 Motif

[0121] The allele-specific HLA-A24 motif is characterized by the presence in peptide ligands of Y, F, W, or M as a primary anchor residue in position 2, and F, L, I, or W as a primary anchor residue at the C-terminal position of the epitope. Peptide binding to HLA-A24 molecules can be modulated by substitutions at primary and/or secondary anchor positions; preferably choosing respective residues specified for the motif.

[0122] Representative epitopes that comprise the A24 motif are set forth on Table XVIII. These epitopes are also listed in Table X, HLA-A24-supermotif-bearing epitopes.

Motifs Indicative of HLA Class II HTL Epitopes

[0123] Primary and secondary anchor residues of the HLA class II supermotifs and motifs delineated below are summarized in Table III.

15. HLA DR-1-4-7 Supermotif

[0124] Motifs have also been identified for peptides that bind to three common HLA class II allele-specific HLA molecules: HLA DRB1*0401, DRB1*0101, and DRB1*0701. Collectively, the common residues from these motifs delineate the HLA DR-1-4-7 supermotif. Peptides that bind to these DR molecules carry a supermotif characterized by a large aromatic or hydrophobic residue (Y, F, W, L, I, V, or M) as a primary anchor residue in position 1, and a small, non-charged residue (S, T, C, A, P, V, I, L, or M) as a primary anchor residue in position 6 of the epitope. Allele-specific secondary effects and secondary anchors for each of these HLA types have also been identified. These are set forth in Table III. Peptide binding to HLA-DR4, DR1, and/or DR7 can be modulated by substitutions at primary and/or secondary anchor positions, preferably choosing respective residues specified for the supermotif.

[0125] Conserved peptide epitopes (i.e. 75% conservancy in the 20 HBV strains used for the analysis), corresponding to a nine residue core comprising the DR-1-4-7 supermotif (wherein position 1 of the motif is at position 1 of the nine residue core) are set forth in Table XIXa (see, e.g., Madden, Annu. Rev. Immunol. 13:587-622, 1995). Respective exemplary peptide epitopes of 15 amino acid residues in length, each of which comprise a conserved nine residue core, are also shown in section “a” of the Table. ° Cross-reactive binding data for the exemplary 15-residue supermotif-bearing peptides denoted by a peptide number are shown in Table XIXb.

16. HLA DR3 Motifs

[0126] Two alternative motifs (i.e., submotifs) characterize peptide epitopes that bind to HLA-DR3 molecules. In the first motif (submotif DR3A) a large, hydrophobic residue (L, I, V, M, F, or Y) is present in anchor position 1, and D is present as an anchor at position 4, towards the carboxyl terminus of the epitope.

[0127] The alternative DR3 submotif provides for lack of the large, hydrophobic residue at anchor position 1, and/or lack of the negatively charged or amide-like anchor residue at position 4, by the presence of a positive charge at position 6 towards the carboxyl terminus of the epitope. Thus, for the alternative allele-specific DR3 motif (submotif DR3B): L, I, V, M, F, Y, A, or Y is present at anchor position 1; D, N, Q, E, S, or T is present at anchor position 4; and K, R, or H is present at anchor position 6. Peptide binding to HLA-DR3 can be modulated by substitutions at primary and/or secondary anchor positions, preferably choosing respective residues specified for the motif.

[0128] Conserved peptide epitopes (i.e., sequences that are 75% conservaned in the 20 HBV strains used for the analysis), corresponding to a nine residue core comprising the DR3A submotif (wherein position 1 of the motif is at position 1 of the nine residue core) set forth in Table XXa. Respective exemplary peptide epitopes of 15 amino acid residues in length, each of which comprise a conserved nine residue core, are also shown in section “a” of the Table. Table XXb shows binding data of the exemplary DR3 submotif A-bearing peptides denoted by a peptide number.

[0129] Conserved peptide epitopes (i.e., 75% conservancy in the 20 HBV strains used for the analysis), corresponding to a nine residue core comprising the DR3B submotif and respective exemplary 15-mer peptides comprising the DR3 submotif-B epitope are set forth in Table XXc. Table XXd shows binding data of the exemplary DR3 submotif B-bearing peptides denoted by a peptide number.

[0130] Each of the HLA class I or class II peptide epitopes set out in the Tables herein are deemed singly to be an inventive aspect of this application. Further, it is also an inventive aspect of this application that each peptide epitope may be used in combination with any other peptide epitope.

E. Enhancing Population Coverage of the Vaccine

[0131] Vaccines that have broad population coverage are preferred because they are more commercially viable and generally applicable to the most people. Broad population coverage can be obtained using the peptides of the invention (and nucleic acid compositions that encode such peptides) through selecting peptide epitopes that bind to HLA alleles which, when considered in total, are present in most of the population. Table XXI lists the overall frequencies of the HLA class I supertypes in various ethnicities (Table XXIa) and the combined population coverage achieved by the A2-, A3-, and B7-supertypes (Table XXIb). The A2-, A3-, and B7 supertypes are each present on the average of over 40% in each of these five major ethnic groups. Coverage in excess of 80% is achieved with a combination of these supermotifs. These results suggest that effective and non-ethnically biased population coverage is achieved upon use of a limited number of cross-reactive peptides. Although the population coverage reached with these three main peptide specificities is high, coverage can be expanded to reach 95% population coverage and above, and more easily achieve truly multispecific responses upon use of additional supermotif or allele-specific motif bearing peptides.

[0132] The B44-, A1-, and A24-supertypes are present, on average, in a range from 25% to 40% of these major ethnic populations (Table XXIa). While less prevalent overall, the B27-, B58-, and B62 supertypes are each present with a frequency >25% in at least one major ethnic group (Table XXIa). Table XXIb summarizes the estimated combined prevalence in five major ethnic groups of HLA supertypes that have been identified. The incremental coverage obtained by the inclusion of A1,- A24-, and B44-supertypes to the A2, A3, and B7 coverage, or all of the supertypes described herein is shown. By including epitopes from the six most frequent supertypes, an average population coverage of 99% is obtained for five major ethnic groups.

[0133] The data presented herein, together with the previous definition of the A2-, A3-, and B7-supertypes, indicates that all antigens, with the possible exception of A29, B8, and B46, can be classified into a total of nine HLA supertypes. Focusing on the six most common supertypes affords population coverage greater than 98% for all major ethnic populations.

F. Immune Response Stimulating Peptide Analogs

[0134] Although peptides with suitable cross-reactivity among all alleles of a superfamily are identified by the screening procedures described above, cross-reactivity is not always complete and in such cases procedures to further increase cross-reactivity of peptides can be useful; such procedures can also be used to modify other properties of the peptides. Having established the general rules that govern cross-reactivity of peptides for HLA alleles within a given motif or supermotif, modification (i.e., analoging) of the structure of peptides of particular interest in order to achieve broader (or otherwise modified) HLA binding capacity can be performed. More specifically, peptides which exhibit the broadest cross-reactivity patterns, (both amongst the known T cell epitopes, as well as the more extended set of peptides that contain the appropriate supermotifs), can be produced in accordance with the teachings herein.

[0135] The strategy employed utilizes the motifs or supermotifs which correlate with binding to certain HLA molecules. The motifs or supermotifs are defined by having primary anchors, though secondary anchors can also be modified. Analog peptides can be created by substituting amino acids residues at primary anchor, secondary anchor, or at primary and secondary anchor positions. Generally, analogs are made for peptides that already bear a motif or supermotif. Preferred secondary anchor residues of supermotifs and motifs that have been defined for HLA class I and class II binding peptides are shown in Tables II and III, respectively.

[0136] For a number of the motifs or supermotifs in accordance with the invention, residues are defined which are deleterious to binding to allele-specific HLA molecules or members of HLA supertypes that bind to the respective motif or supermotif (Tables II and IIH). Accordingly, removal of residues that are detrimental to binding can be performed in accordance with the present invention. For example, in the case of the A3 supertype, when all peptides that have such deleterious residues are removed from the population of analyzed peptides, the incidence of cross-reactivity increases from 22% to 37% (see, e.g., Sidney, J. et al., Hu. Immunol. 45:79, 1996). Thus, one strategy to improve the cross-reactivity of peptides within a given supermotif is simply to delete one or more of the deleterious residues present within a peptide and substitute a small “neutral” residue such as Ala (that may not influence T cell recognition of the peptide). An enhanced likelihood of cross-reactivity is expected if, together with elimination of detrimental residues within a peptide, residues associated with high affinity binding to multiple alleles within a superfamily are inserted.

[0137] To ensure that an analog peptide, when used as a vaccine, actually elicits a CTL response to the native epitope in vivo (or, in the case of class II epitopes, elicits helper T cells that cross-react with the wild type peptides), the analog peptide may be used to immunize T cells in vitro from individuals of the appropriate HLA allele. Thereafter, the immunized cells' capacity to induce lysis of wild type peptide sensitized target cells is evaluated. It will be desirable to use as antigen presenting cells, cells that have been either infected, or transfected with the appropriate genes, or, in the cae of class II epitopes only, cells that have been pusled with whole protein antigens, to establish whether endogenously produced antigen is also recognized by the relevant T cells.

[0138] Another embodiment of the invention to ensure adequate numbers of cross-reactive cellular binders is to create analogs of weak binding peptides. Class I peptides exhibiting binding affinities of 500-50000 nM, and carrying an acceptable but suboptimal primary anchor residue at one or both positions can be “fixed” by substituting preferred anchor residues in accordance with the respective supertype. The analog peptides can then be tested for crossbinding activity.

[0139] Another embodiment for generating effective peptide analogs involves the substitution of residues that have an adverse impact on peptide stability or solubility in a liquid environment. This substitution may occur at any position of the peptide epitope. For example, a cysteine (C) can be substituted out in favor of ax-amino butyric acid. Due to its chemical nature, cysteine has the propensity to form disulfide bridges and sufficiently alter the peptide structurally so as to reduce binding capacity. Substituting α-amino butyric acid for C not only alleviates this problem, but actually improves binding and crossbinding capability in certain instances (Review: A. Sette et al., In: Persistent Viral Infections, Eds. R. Ahmed and I. Chen, John Wiley & Sons, England, 1999). Substitution of cysteine with α-amino butyric acid may occur at any residue of a peptide epitope, i.e. at either anchor or non-anchor positions.

[0140] In general, CTL and HTL responses are not directed against all possible epitopes. Rather, they are restricted to a few immunodominant determinants (Zinkemagel, et al., Adv. Immunol. 27:5159, 1979; Bennink, et al., J. Exp. Med. 168:19351939, 1988; Rawle, et al., J. Immunol. 146:3977-3984, 1991). It has been recognized that immunodominance (Benacerraf, et al., Science 175:273-279, 1972) could be explained by either the ability of a given epitope to selectively bind a particular HLA protein (determinant selection theory) (Vitiello, et al., J. Immunol. 131:1635, 1983); Rosenthal, et al., Nature 267:156-158, 1977), or being selectively recognized by the existing TCR (T cell receptor) specificities (repertoire theory) (Klein, J., Immunology, the Science of SelfNonself Discrimination, John Wiley & Sons, New York, pp. 270-310, 1982). It has been demonstrated that additional factors, mostly linked to processing events, can also play a key role in dictating, beyond strict immunogenicity, which of the many potential determinants will be presented as immunodominant (Sercarz, et al., Annu. Rev. Immunol. 11:729-766, 1993).

[0141] The concept of dominance and subdominance is relevant to immunotherapy of both infectious diseases and cancer. For example, in the course of chronic viral disease, recruitment of subdominant epitopes can be important for successful clearance of the infection, especially if dominant CTL or HTL specificities have been inactivated by functional tolerance, suppression, mutation of viruses and other mechanisms (Franco, et al., Curr. Opin. Immunol. 7:524-531, (1995)). In the case of cancer and tumor antigens, CTLs recognizing at least some of the highest binding affinity peptides might be functionally inactivated. Lower binding affinity peptides are preferentially recognized at these times.

[0142] In particular, it has been noted that a significant number of epitopes derived from known non-viral tumor associated antigens (TAA) bind HLA class I with intermediate affinity (IC₅₀ in the 50-500 nM range). For example, it has been found that 8 of 15 known TAA peptides recognized by tumor infiltrating lymphocytes (TIL) or CTL bound in the 50-500 nM range. (These data are in contrast with estimates that 90% of known viral antigens that were recognized as peptides bound HLA with IC₅₀ of 50 nM or less, while only approximately 10% bound in the 50-500 nM range (Sette, et al., J. Immunol., 153:558-5592 (1994)). In the cancer setting this phenomenon is probably due to elimination, or functional inhibition of the CTL recognizing several of the highest binding peptides, presumably because of T cell tolerization events.

[0143] Without intending to be bound by theory, it is believed that because T cells to dominant epitopes may have been clonally deleted, selecting subdominant epitopes may allow extant T cells to be recruited, which will then lead to a therapeutic response. However, the binding of HLA molecules to subdominant epitopes is often less vigorous than to dominant ones. Accordingly, there is a need to be able to modulate the binding affinity of particular immunogenic epitopes for one or more HLA molecules, and thereby to modulate the immune response elicited by the peptide. Thus, a need exists to prepare analog peptides which elicit a more vigorous response. This ability would greatly enhance the usefulness of peptide-based vaccines and therapeutic agents.

[0144] Representative analog peptides are set forth in Table XXII. The Table indicates the length and sequence of the analog peptide as well as the motif or supermotif, if appropriate. The information in the “Fixed Nomenclature” column indicates the residues substituted at the indicated position numbers for the respective analog.

G. Computer Screening of Protein Sequences from Disease-Related Antigens for Supermotif or Motif Containing Peptides

[0145] In order to identify supermotif- or motif-bearing epitopes in a target antigen, a native protein sequence, e.g., a tumor-associated antigen, or sequences from an infectious organism, or a donor tissue for transplantation, is screened using a means for computing, such as an intellectual calculation or a computer, to determine the presence of a supermotif or motif within the sequence. The information obtained from the analysis of native peptide can be used directly to evaluate the status of the native peptide or may be utilized subsequently to generate the peptide epitope.

[0146] Computer programs that allow the rapid screening of protein sequences for the occurrence of the subject supermotifs or motifs are encompassed by the present invention; as are programs that permit the generation of analog peptides. These programs are implemented to analyze any identified amino acid sequence or operate on an unknown sequence and simultaneously determine the sequence and identify motif-bearing epitopes thereof; analogs can be simultaneously determined as well. Generally, the identified sequences will be from a pathogenic organism or a tumor-associated peptide. For example, the target molecules considered herein include all of the HBV proteins (e.g. surface, core, polymerase, and X).

[0147] In cases where the sequence of multiple variants of the same target protein are available, peptides may also be selected on the basis of their conservancy. A presently preferred criterion for conservancy defines that the entire sequence of a peptide be totally conserved in 75% of the sequences evaluated for a specific protein; this definition of conservancy has been employed herein.

[0148] It is important that the selection criteria utilized for prediction of peptide binding are as accurate as possible, to correlate most efficiently with actual binding. Prediction of peptides that bind, for example, to HLA-A*0201, on the basis of the presence of the appropriate primary anchors, is positive at about a 30% rate (Ruppert, J. et al. Cell 74:929, 1993). However, by analyzing an extensive peptide-HLA binding database, the present inventors have developed a number of allele specific polynomial algorithms that dramatically increase the predictive value over identification on the basis of the presence of primary anchor residues alone. These algorithms take into account not only the presence or absence of the correct primary anchors, but also consider the positive or F deleterious presence of secondary anchor residues (to account for the impact of different amino acids at different positions). The algorithms are essentially based on the premise F that the overall affinity (or ΔG) of peptide-HLA interactions can be approximated as a linear polynomial function of the type:
ΔG=a1i×a2i×a3i . . . x ani
[0149] where aij is a coefficient that represents the effect of the presence of a given amino acid (i) at a given position (i) along the sequence of a peptide of n amino acids. An important assumption of this method is that the effects at each position are essentially independent of each other. This assumption is justified by studies that demonstrated that peptides are bound to HLA molecules and recognized by T cells in essentially an extended conformation. Derivation of specific algorithm coefficients has been described in Gulukota et al. (Gulukota, K. et al., J.Mol.Biol. 267:1258, 1997).

[0150] Additional methods to identify preferred peptide sequences, which also make use of specific motifs, include the use of neural networks and molecular modeling programs (see, e.g., Milik et al., Nature Biotechnology 16:753, 1998; Altuvia et al., Hum. Immunol. 58:1, 1997; Altuvia et al, J. Mol. Biol. 249:244, 1995; Buus, S. Curr. Opin. Immunol. 11:209-213, 1999; Brusic, V. et al., Bioinformatics 14:121-130, 1998; Parker et al., J. Immunol. 152:163, 1993; Meister et al., Vaccine 13:581, 1995; Hammer et al., J. Exp. Med. 180:2353, 1994; Sturniolo et al., Nature Biotechnol. 17:555 1999).

[0151] For example, it has been shown that in sets of A*0201 motif peptides, 69% of the peptides containing at least one preferred secondary anchor residue while avoiding the presence of any deleterious secondary anchor residues, will bind A*0201 with an IC₅₀ less than 500 nM (Ruppert, J. et al. Cell 74:929, 1993). These algorithms are also flexible in that cut-off scores may be adjusted to select sets of peptides with greater or lower predicted binding properties, as desired.

[0152] In utilizing computer screening to identify peptide epitopes, all protein sequence or translated sequence may be analyzed using software developed to search for motifs, for example the “FINDPATTERNS” program (Devereux, et al. Nucl. Acids Res. 12:387-395, 1984) or MotifSearch 1.4 software program (D. Brown, San Diego, Calif.) to identify potential peptide sequences containing appropriate HLA binding motifs. As appreciated by one of ordinary skill in the art a large array of software and hardware options are available which can be employed to implement the motifs of the invention relative to known or unknown peptide sequences. The identified peptides will then be scored using customized polynomial algorithms to predict their capacity to bind specific HLA class I or class II alleles.

[0153] In accordance with the procedures described above, HBV peptides and analogs thereof that are able to bind HLA supertype groups or allele-specific HLA molecules have been identified (Tables VII-XX; Table XXII).

H. Reparation of Peptide Epitopes

[0154] Peptides in accordance with the invention can be prepared synthetically, by recombinant DNA technology or chemical synthesis, or from natural sources such as native tumors or pathogenic organisms. Peptide epitopes may be synthesized individually or as polyepitopic peptides. Although the peptide will preferably be substantially free of other naturally occurring host cell proteins and fragments thereof, in some embodiments the peptides may be synthetically conjugated to native fragments or particles.

[0155] The peptides in accordance with the invention can be a variety of lengths, and either in their neutral (uncharged) forms or in forms which are salts. The peptides in accordance with the invention are either free of modifications such as glycosylation, side chain oxidation, or phosphorylation; or they contain these modifications, subject to the condition that modifications do not destroy the biological activity of the peptides as described herein.

[0156] When possible, it may be desirable to optimize HLA class I binding epitopes of the invention, such as can be used in a polyepitopic construct, to a length of about 8 to about 13 amino acid residues, often 8 to 11, preferably 9 to 10. HLA class II binding peptide epitopes of the invention may be optimized to a length of about 6 to about 30 amino acids in length, preferably to between about 13 and about 20 residues. Preferably, the peptide epitopes are commensurate in size with endogenously processed pathogen-derived peptides or tumor cell peptides that are bound to the relevant HLA molecules, however, the identification and preparation of peptides that comprise epitopes of the invention can also be carried out using the techniques described herein.

[0157] In alternative embodiments, epitopes of the invention can be linked as a polyepitopic peptide, or as a minigene that encodes a polyepitopic peptide.

[0158] In another embodiment, it is preferred to identify native peptide regions that contain a high concentration of class I and/or class II epitopes. Such a sequence is generally selected on the basis that it contains the greatest number of epitopes per amino acid length. It is to be appreciated that epitopes can be present in a nested or overlapping manner, e.g. a 10 amino acid long peptide could contain two 9 amino acid long epitopes and one 10 amino acid long epitope; upon intracellular processing, each epitope can be exposed and bound by an HLA molecule upon administration of such a peptide. This larger, preferably multi-epitopic, peptide can be generated synthetically, recombinantly, or via cleavage from the native source.

[0159] The peptides of the invention can be prepared in a wide variety of ways. For the preferred relatively short size, the peptides can be synthesized in solution or on a solid support in accordance with conventional techniques. Various automatic synthesizers are commercially available and can be used in accordance with known protocols. (See, for example, Stewart & Young, Solid Phase Peptide Synthesis, 2d. ed., Pierce Chemical Co., 1984). Further, individual peptide epitopes can be joined using chemical ligation to produce larger peptides that are still within the bounds of the invention.

[0160] Alternatively, recombinant DNA technology can be employed wherein a nucleotide sequence which encodes an immunogenic peptide of interest is inserted into an expression vector, transformed or transfected into an appropriate host cell and cultivated under conditions suitable for expression. These procedures are generally known in the art, as described generally in Sambrook et al., Molecular Cloning, a Laboratory Manual, Cold Spring Harbor Press, Cold Spring Harbor, N.Y. (1989). Thus, recombinant polypeptides which comprise one or more peptide sequences of the invention can be used to present the appropriate T cell epitope.

[0161] The nucleotide coding sequence for peptide epitopes of the preferred lengths contemplated herein can be synthesized by chemical techniques, for example, the phosphotriester method of Matteucci, et al., J. Am. Chem. Soc. 103:3185 (1981). Peptide analogs can be made simply by substituting the appropriate and desired nucleic acid base(s) for those that encode the native peptide sequence; exemplary nucleic acid substitutions are those that encode an amino acid defined by the motifs/supermotifs herein. The coding sequence can then be provided with appropriate linkers and ligated into expression vectors commonly available in the art, and the vectors used to transform suitable hosts to produce the desired fusion protein. A number of such vectors and suitable host systems are now available. For expression of the fusion proteins, the coding sequence will be provided with operably linked start and stop codons, promoter and terminator regions and usually a replication system to provide an expression vector for expression in the desired cellular host. For example, promoter sequences compatible with bacterial hosts are provided in plasmids containing convenient restriction sites for insertion of the desired coding sequence. The resulting expression vectors are transformed into suitable bacterial hosts. Of course, yeast, insect or mammalian cell hosts may also be used, employing suitable vectors and control sequences.

I. Assays to Detect T-Cell Responses

[0162] Once HLA binding peptides are identified, they can be tested for the ability to elicit a T-cell response. The preparation and evaluation of motif-bearing peptides are described in PCT publications WO 94/20127 and WO 94/03205. Briefly, peptides comprising epitopes from a particular antigen are synthesized and tested for their ability to bind to the appropriate HLA proteins. These assays may involve evaluating the binding of a peptide of the invention to purified HLA class I molecules in relation to the binding of a radioiodinated reference peptide. Alternatively, cells expressing empty class I molecules (i.e. lacking peptide therein) may be evaluated for peptide binding by immunofluorescent staining and flow microfluorimetry. Other assays that may be used to evaluate peptide binding include peptide-dependent class I assembly assays and/or the inhibition of CTL recognition by peptide competition. Those peptides that bind to the class I molecule, typically with an affinity of 500 nM or less, are further evaluated for their ability to serve as targets for CTLs derived from infected or immunized individuals, as well as for their capacity to induce primary in vitro or in vivo CTL responses that can give rise to CTL populations capable of reacting with selected target cells associated with a disease.

[0163] Analogous assays are used for evaluation of HLA class II binding peptides. HLA class II motif-bearing peptides that are shown to bind, typically at an affinity of 1000 nM or less, are further evaluated for the ability to stimulate HTL responses.

[0164] Conventional assays utilized to detect T cell responses include proliferation assays, lymphokine secretion assays, direct cytotoxicity assays, and limiting dilution assays. For example, antigen-presenting cells that have been incubated with a peptide can be assayed for the ability to induce CTL responses in responder cell populations. Antigen-presenting cells can be normal cells such as peripheral blood mononuclear cells or dendritic cells. Alternatively, mutant non-human mammalian cell lines that are deficient in their ability to load class I molecules with internally processed peptides and that have been transfected with the appropriate human class I gene, may be used to test for the capacity of the peptide to induce in vitro primary CTL responses.

[0165] Peripheral blood mononuclear cells (PBMCs) may be used as the responder cell source of CTL precursors. The appropriate antigen-presenting cells are incubated with peptide, after which the peptide-loaded antigen-presenting cells are then incubated with the responder cell population under optimized culture conditions. Positive CTL activation can be determined by assaying the culture for the presence of CTLs that kill radio-labeled target cells, both specific peptide-pulsed targets as well as target cells expressing endogenously processed forms of the antigen from which the peptide sequence was derived.

[0166] Additionally, a method has been devised which allows direct quantification of antigen-specific T cells by staining with Fluorescein-labelled HLA tetrameric complexes (Altman, J. D. et al., Proc. Natl. Acad. Sci. USA 90:10330, 1993; Altman, J. D. et al., Science 274:94, 1996). Other relatively recent technical developments include staining for intracellular lymphokines, and interferon release assays or ELISPOT assays. Tetramer staining, intracellular lymphokine staining and ELISPOT assays all appear to be at least 10-fold more sensitive than more conventional assays (Lalvani, A. et al., J. Exp. Med. 186:859, 1997; Dunbar, P. R. et al., Curr. Biol. 8:413, 1998; Murali-Krishna, K. et al., Immunity 8:177, 1998).

[0167] HTL activation may also be assessed using such techniques known to those in the art such as T cell proliferation and secretion of lymphokines, e.g. IL-2 (see, e.g. Alexander et al., Immunity 1:751-761, 1994).

[0168] Alternatively, immunization of HLA transgenic mice can be used to determine immunogenicity of peptide epitopes. Several transgenic mouse models including mice with human A2.1, A11 (which can additionally be used to analyze HLA-A3 epitopes), and B7 alleles have been characterized and others (e.g., transgenic mice for HLA-A1 and A24) are being developed. HLA-DR1 and HLA-DR3 mouse models have also been developed. Additional transgenic mouse models with other HLA alleles may be generated as necessary. Mice may be immunized with peptides emulsified in Incomplete Freund's Adjuvant and the resulting T cells tested for their capacity to recognize peptide-pulsed target cells and target cells transfected with appropriate genes. CTL responses may be analyzed using cytotoxicity assays described above. Similarly, HTL responses may be analyzed using such assays as T cell proliferation or secretion of lymphokines.

[0169] Immunogenic peptide epitopes are set out in Table XXIII.

J. Use of Peptide Epitopes as Diagnostic Agents and for Evaluating Immune Responses

[0170] In one aspect of the invention, HLA class I and class II binding peptides as described herein can be used as reagents to evaluate an immune response. The immune response to be evaluated is induced by using as an immunogen any agent that may result in the production of antigen-specific CTLs or HTLs that recognize and bind to the peptide epitope(s) to be employed as the reagent. The peptide reagent need not be used as the immunogen. Assay systems that are used for such an analysis include relatively recent technical developments such as tetramers, staining for intracellular lymphokines and interferon release assays, or ELISPOT assays.

[0171] For example, a peptide of the invention is used in a tetramer staining assay to assess peripheral blood mononuclear cells for the presence of antigen-specific CTLs following exposure to a pathogen or immunogen. The HLA-tetrameric complex is used to directly visualize antigen-specific CTLs (see, e.g., Ogg et al., Science 279:2103-2106, 1998; and Altman et al., Science 174:94-96, 1996) and determine the frequency of the antigen-specific CTL population in a sample of peripheral blood mononuclear cells.

[0172] A tetramer reagent using a peptide of the invention is generated as follows: A peptide that binds to an HLA molecule is refolded in the presence of the corresponding HLA heavy chain and β2-microglobulin to generate a trimolecular complex. The complex is biotinylated at the carboxyl terminal end of the heavy chain at a site that was previously engineered into the protein. Tetramer formation is then induced by the addition of streptavidin. By means of fluorescently labeled streptavidin, the tetramer can be used to stain antigen-specific cells. The cells can then be readily identified, for example, by flow cytometry. Such procedures are used for diagnostic or prognostic purposes. Cells identified by the procedure can also be used for therapeutic purposes.

[0173] Peptides of the invention are also used as reagents to evaluate immune recall responses. (see, e.g., Bertoni et al., J. Clin. Invest. 100:503-513, 1997 and Penna et al., J. Exp. Med. 174:1565-1570, 1991.) For example, patient PBMC samples from individuals infected with HPV are analyzed for the presence of antigen-specific CTLs or HTLs using specific peptides. A blood sample containing mononuclear cells may be evaluated by cultivating the PBMCs and stimulating the cells with a peptide of the invention. After an appropriate cultivation period, the expanded cell population may be analyzed, for example, for CTL or for HTL activity.

[0174] The peptides are also used as reagents to evaluate the efficacy of a vaccine. PBMCs obtained from a patient vaccinated with an immunogen are analyzed using, for example, either of the methods described above. The patient is HLA typed, and peptide epitope reagents that recognize the allele-specific molecules present in that patient are selected for the analysis. The immunogenicity of the vaccine is indicated by the presence of HPV epitope-specific CTLs and/or HTLs in the PBMC sample.

[0175] The peptides of the invention are also be used to make antibodies, using techniques well known in the art (see, e.g. Current Protocols in Immunology, Wiley/Greene, N.Y.; and Antibodies A Laboratory Manual Harlow, Harlow and Lane, Cold Spring Harbor Laboratory Press, 1989), which may be useful as reagents to diagnose HPV infection. Such antibodies include those that recognize a peptide in the context of an HLA molecule, i.e., antibodies that bind to a peptide-MHC complex.

K. Vaccine Compositions

[0176] Vaccines and methods of preparing vaccines that contain an immunogenically effective amount of one or more peptides as described herein are further embodiments of the invention. Once appropriately immunogenic epitopes have been defined, they can be sorted and delivered by various means, herein referred to as “vaccine” compositions. Such vaccine compositions can include, for example, lipopeptides (e.g.,Vitiello, A. et al., J. Clin. Invest. 95:341, 1995), peptide compositions encapsulated in poly(DL-lactide-co-glycolide) (“PLG”) microspheres (see, e.g., Eldridge, et al., Molec. Immunol. 28:287-294, 1991: Alonso et al., Vaccine 12:299-306, 1994; Jones et al., Vaccine 13:675-681, 1995), peptide compositions contained in immune stimulating complexes (ISCOMS) (see, e.g., Takahashi et al., Nature 344:873-875, 1990; Hu et al., Clin Exp Immunol. 113:235-243, 1998), multiple antigen peptide systems (MAPs) (see e.g., Tam, J. P., Proc. Natl. Acad. Sci. U.S.A. 85:5409-5413, 1988; Tam, J. P., J. Immunol. Methods 196:17-32, 1996), peptides formulated as multivalent peptides; peptides for use in ballistic delivery systems, typically crystallized peptides, viral delivery vectors (Perkus, M. E. et al., In: Concepts in vaccine development, Kaufmann, S. H. E., ed., p. 379, 1996; Chakrabarti, S. et al., Nature 320:535, 1986; Hu, S. L. et al., Nature 320:537, 1986; Kieny, M.-P. et al., AIDS Bio/Technology 4:790, 1986; Top, F. H. et al., J. Infect. Dis. 124:148, 1971; Chanda, P. K. et al., Virology 175:535, 1990), particles of viral or synthetic origin (e.g., Kofler, N. et al., J. Immunol. Methods. 192:25, 1996; Eldridge, J. H. et al., Sem. Hematol. 30:16, 1993; Falo, L. D., Jr. et al., Nature Med. 7:649, 1995), adjuvants (Warren, H. S., Vogel, F. R., and Chedid, L. A. Annu. Rev. Immunol. 4:369, 1986; Gupta, R. K. et al., Vaccine 11:293, 1993), liposomes (Reddy, R. et al., J. Immunol. 148:1585, 1992; Rock, K. L., Immunol. Today 17:131, 1996), or, naked or particle absorbed cDNA (Ulmer, J. B. et al., Science 259:1745, 1993; Robinson, H. L., Hunt, L. A., and Webster, R. G., Vaccine 11:957, 1993; Shiver, J. W. et al., In: Concepts in vaccine development, Kaufmann, S. H. E., ed., p. 423, 1996; Cease, K. B., and Berzofsky, J. A., Annu. Rev. Immunol. 12:923, 1994 and Eldridge, J. H. et al., Sem. Hematol. 30:16, 1993). Toxin-targeted delivery technologies, also known as receptor mediated targeting, such as those of Avant Immunotherapeutics, Inc. (Needham, Mass.) may also be used.

[0177] Vaccine compositions of the invention include nucleic acid-mediated modalities. DNA or RNA encoding one or more of the peptides of the invention can also be administered to a patient. This approach is described, for instance, in Wolff et. al., Science 247:1465 (1990) as well as U.S. Pat. Nos. 5,580,859; 5,589,466; 5,804,566; 5,739,118; 5,736,524; 5,679,647; WO 98/04720; and in more detail below. Examples of DNA-based delivery technologies include “naked DNA”, facilitated (bupivicaine, polymers, peptide-mediated) delivery, cationic lipid complexes, and particle-mediated (“gene gun”) or pressure-mediated delivery (see, e.g., U.S. Pat. No. 5,922,687).

[0178] For therapeutic or prophylactic immunization purposes, the peptides of the invention can be expressed by viral or bacterial vectors. Examples of expression vectors include attenuated viral hosts, such as vaccinia or fowlpox. This approach involves the use of vaccinia virus, for example, as a vector to express nucleotide sequences that encode the peptides of the invention. Upon introduction into an acutely or chronically infected host or into a non-infected host, the recombinant vaccinia virus expresses the immunogenic peptide, and thereby elicits a host CTL and/or HTL response. Vaccinia vectors and methods useful in immunization protocols are described in, e.g., U.S. Pat. No. 4,722,848. Another vector is BCG (Bacille Calmette Guerin). BCG vectors are described in Stover et al., Nature 351:456-460 (1991). A wide variety of other vectors e.g. adeno and adeno-associated virus vectors, retroviral vectors, Salmonella typhi vectors, detoxified anthrax toxin vectors, and the like, will be apparent to those skilled in the art from the description herein.

[0179] Furthermore, vaccines in accordance with the invention encompass compositions of one or more of the claimed peptides. A peptide can be present in a vaccine individually. Alternatively, the peptide can exist as a homopolymer comprising multiple copies of the same peptide, or as a heteropolymer of various peptides. Polymers have the advantage of increased immunological reaction and, where different peptide epitopes are used to make up the polymer, the additional ability to induce antibodies and/or CTLs that react with different antigenic determinants of the pathogenic organism or tumor-related peptide targeted for an immune response. The composition can be a naturally occurring region of an antigen or can be prepared, e.g., recombinantly or by chemical synthesis.

[0180] Carriers that can be used with vaccines of the invention are well known in the art, and include, e.g., thyroglobulin, albumins such as human serum albumin, tetanus toxoid, polyamino acids such as poly 1-lysine, poly 1-glutamic acid, influenza, hepatitis B virus core protein, and the like. The vaccines can contain a physiologically tolerable (i.e., acceptable) diluent such as water, or saline, preferably phosphate buffered saline. The vaccines also typically include an adjuvant. Adjuvants such as incomplete Freund's adjuvant, aluminum phosphate, aluminum hydroxide, or alum are examples of materials well known in the art. Additionally, as disclosed herein, CTL responses can be primed by conjugating peptides of the invention to lipids, such as tripalmitoyl-S-glycerylcysteinlyseryl-serine (P3CSS).

[0181] Upon immunization with a peptide composition in accordance with the invention, via injection, aerosol, oral, transdermal, transmucosal, intrapleural, intrathecal, or other suitable routes, the immune system of the host responds to the vaccine by producing large amounts of CTLs and/or HTLs specific for the desired antigen. Consequently, the host becomes at least partially immune to later infection, or at least partially resistant to developing an ongoing chronic infection, or derives at least some therapeutic benefit when the antigen was tumor-associated.

[0182] In some embodiments, it may be desirable to combine the class I peptide components with components that induce or facilitate neutralizing antibody and or helper T cell responses to the target antigen of interest. A preferred embodiment of such a composition comprises class I and class II epitopes in accordance with the invention. An alternative embodiment of such a composition comprises a class I and/or class II epitope in accordance with the invention, along with a PanDR molecule, e.g., PADRE® (Epimmune, San Diego, Calif.; described, e.g., in U.S. Pat. No. 5,736,142).

[0183] A vaccine of the invention can also include antigen-presenting cells (APC), such as dendritic cells (DC), as a vehicle to present peptides of the invention. Vaccine compositions can be created in vitro, following dendritic cell mobilization and harvesting, whereby loading of dendritic cells occurs in vitro. For example, dendritic cells are transfected, e.g., with a minigene in accordance with the invention, or are pulsed with peptides. The dendritic cell can then be administered to a patient to elicit immune responses in vivo.

[0184] Vaccine compositions, either DNA- or peptide-based, can also be administered in vivo in combination with dendritic cell mobilization whereby loading of dendritic cells occurs in vivo.

[0185] Antigenic peptides are used to elicit a CTL and/or HTL response ex vivo, as well. The resulting CTL or HTL cells, can be used to treat chronic infections, or tumors in patients that do not respond to other conventional forms of therapy, or will not respond to a therapeutic vaccine peptide or nucleic acid in accordance with the invention. Ex vivo CTL or HTL responses to a particular antigen (infectious or tumor-associated antigen) are induced by incubating in tissue culture the patient's, or genetically compatible, CTL or HTL precursor cells together with a source of APC, such as DC, and the appropriate immunogenic peptide. After an appropriate incubation time (typically about 7-28 days), in which the precursor cells are activated and expanded into effector cells, the cells are infused back into the patient, where they will destroy or facilitate destruction of their specific target cell (an infected cell or a tumor cell). Transfected dendritic cells may also be used as antigen presenting cells.

[0186] The vaccine compositions of the invention can also be used in combination with other treatments used for chronic viral infection, including use in combination with immune adjuvants such as IFN-γ and the like.

[0187] Preferably, the following principles are utilized when selecting an array of epitopes for inclusion in a polyepitopic composition for use in a vaccine, or for selecting discrete epitopes to be included in a vaccine and/or to be encoded by nucleic acids such as a minigene. It is preferred that each of the following principles are balanced in order to make the selection. The multiple epitopes to be incorporated in a given vaccine composition may be, but need not be, contiguous in sequence in the native antigen from which the epitopes are derived.

[0188] 1.) Epitopes are selected which, upon administration, mimic immune responses that have been observed to be correlated with HBV clearance. For HLA Class I this includes 3-4 epitopes that come from at least one antigen of HBV. In other words, it has been observed that in patients who spontaneously clear HBV, that they had generated an immune response to at least 3 epitopes on at least one HBV antigen. For HLA Class II a similar rationale is employed; again 3-4 epitopes are selected from at least one HBV antigen (see e.g., Rosenberg et al. Science 278:1447-1450).

[0189] 2.) Epitopes are selected that have the requisite binding affinity established to be correlated with immunogenicity: for HLA Class I an IC₅₀ of 500 nM or less, often 200 nM or less; and for Class II an IC₅₀ of 1000 nM or less.

[0190] 3.) Sufficient supermotif bearing-peptides, or a sufficient array of allele-specific motif-bearing peptides, are selected to give broad population coverage. For example, it is preferable to have at least 80% population coverage. A Monte Carlo analysis, a statistical evaluation known in the art, can be employed to assess the breadth, or redundancy of, population coverage.

[0191] 4.) When selecting epitopes from cancer-related antigens it is often useful to select analogs because the patient may have developed tolerance to the native epitope. When selecting epitopes for infectious disease-related antigens it is preferable to select either native or analoged epitopes.

[0192] 5.) Of particular relevance are epitopes referred to as “nested epitopes.” Nested epitopes occur where at least two epitopes overlap in a given peptide sequence. A nested peptide sequence can comprise both HLA class I and HLA class II epitopes. When providing nested epitopes, a general objective is to provide the greatest number of epitopes per sequence. Thus, an aspect is to avoid providing a peptide that is any longer than the amino terminus of the amino terminal epitope and the carboxyl terminus of the carboxyl terminal epitope in the peptide. When providing a multi-epitopic sequence, such as a sequence comprising nested epitopes, it is generally important to screen the sequence in order to insure that it does not have pathological or other deleterious biological properties.

[0193] 6.) If a polyepitopic protein is created, or when creating a minigene, an objective is to generate the smallest peptide that encompasses the epitopes of interest. This principle is similar, if not the same as that employed when selecting a peptide comprising nested epitopes. However, with an artificial polyepitopic peptide, the size minimization objective is balanced against the need to integrate any spacer sequences between epitopes in the polyepitopic protein. Spacer amino acid residues can, for example, be introduced to avoid junctional epitopes (an epitope recognized by the immune system, not present in the target antigen, and only created by the man-made juxtaposition of epitopes), or to facilitate cleavage between epitopes and thereby enhance epitope presentation. Junctional epitopes are generally to be avoided because the recipient may generate an immune response to that non-native epitope. Of particular concern is a junctional epitope that is a “dominant epitope.” A dominant epitope may lead to such a zealous response that immune responses to other epitopes are diminished or suppressed.

[0194] 7.) In cases where the sequences of multiple variants of the same target protein are available, potential peptide epitopes can also be selected on the basis of their conservancy. For example, a criterion for conservancy may define that the entire sequence of an HLA class I binding peptide or the entire 9-mer core of a class II binding peptide be conserved in a designated percentage of the sequences evaluated for a specific protein antigen.

1. Minigene Vaccines

[0195] A number of different approaches are available which allow simultaneous delivery of multiple epitopes. Nucleic acids encoding the peptides of the invention are a particularly useful embodiment of the invention. Epitopes for inclusion in a minigene are preferably selected according to the guidelines set forth in the previous section. A preferred means of administering nucleic acids encoding the peptides of the invention uses minigene constructs encoding a peptide comprising one or multiple epitopes of the invention.

[0196] The use of multi-epitope minigenes is described below and in, e.g., co-pending application U.S. Ser. No. 09/311,784; Ishioka et al., J. Immunol. 162:3915-3925, 1999; An, L. and Whitton, J. L., J. Virol. 71:2292, 1997; Thomson, S. A. et al., J. Immunol. 157:822, 1996; Whitton, J. L. et al., J. Virol. 67:348, 1993; Hanke, R. et al., Vaccine 16:426, 1998. For example, a multi-epitope DNA plasmid encoding supermotif- and/or motif-bearing epitopes derived from multiple regions of one or more HBV antigens, a universal helper T cell epitope, e.g., PADRE®, (or multiple HTL epitopes from HBV antigens), and an endoplasmic reticulum-translocating signal sequence can be engineered. A vaccine may also comprise epitopes that are derived from other TAAs.

[0197] The immunogenicity of a multi-epitopic minigene can be tested in transgenic mice to evaluate the magnitude of CTL induction responses against the epitopes tested. Further, the immunogenicity of DNA-encoded epitopes in vivo can be correlated with the in vitro responses of specific CTL lines against target cells transfected with the DNA plasmid. Thus, these experiments can show that the minigene serves to both: 1.) generate a CTL response and 2.) that the induced CTLs recognized cells expressing the encoded epitopes.

[0198] For example, to create a DNA sequence encoding the selected epitopes (minigene) for expression in human cells, the amino acid sequences of the epitopes may be reverse translated. A human codon usage table can be used to guide the codon choice for each amino acid. These epitope-encoding DNA sequences may be directly adjoined, so that when translated, a continuous polypeptide sequence is created. To optimize expression and/or immunogenicity, additional elements can be incorporated into the minigene design. Examples of amino acid sequences that could be reverse translated and included in the minigene sequence include: HLA class I epitopes, HLA class II epitopes, a ubiquitination signal sequence, and/or an endoplasmic reticulum targeting signal. In addition, HLA presentation of CTL and HTL epitopes may be improved by including synthetic (e.g. poly-alanine) or naturally-occurring flanking sequences adjacent to the CTL or HTL epitopes; these larger peptides comprising the epitope(s) are within the scope of the invention.

[0199] The minigene sequence may be converted to DNA by assembling oligonucleotides that encode the plus and minus strands of the minigene. Overlapping oligonucleotides (30-100 bases long) may be synthesized, phosphorylated, purified and annealed under appropriate conditions using well known techniques. The ends of the oligonucleotides can be joined, for example, using T4 DNA ligase. This synthetic minigene, encoding the epitope polypeptide, can then be cloned into a desired expression vector.

[0200] Standard regulatory sequences well known to those of skill in the art are preferably included in the vector to ensure expression in the target cells. Several vector elements are desirable: a promoter with a down-stream cloning site for minigene insertion; a polyadenylation signal for efficient transcription termination; an E. coli origin of replication; and an E. coli selectable marker (e.g. ampicillin or kanamycin resistance). Numerous promoters can be used for this purpose, e.g., the human cytomegalovirus (hCMV) promoter. See, e.g., U.S. Pat. Nos. 5,580,859 and 5,589,466 for other suitable promoter sequences.

[0201] Additional vector modifications may be desired to optimize minigene expression and immunogenicity. In some cases, introns are required for efficient gene expression, and one or more synthetic or naturally-occurring introns could be incorporated into the transcribed region of the minigene. The inclusion of mRNA stabilization sequences and sequences for replication in mammalian cells may also be considered for increasing minigene expression.

[0202] Once an expression vector is selected, the minigene is cloned into the polylinker region downstream of the promoter. This plasmid is transformed into an appropriate E. coli strain, and DNA is prepared using standard techniques. The orientation and DNA sequence of the minigene, as well as all other elements included in the vector, are confirmed using restriction mapping and DNA sequence analysis. Bacterial cells harboring the correct plasmid can be stored as a master cell bank and a working cell bank.

[0203] In addition, immunostimulatory sequences (ISSs or CpGs) appear to play a role in the immunogenicity of DNA vaccines. These sequences may be included in the vector, outside the minigene coding sequence, if desired to enhance immunogenicity.

[0204] In some embodiments, a bi-cistronic expression vector which allows production of both the minigene-encoded epitopes and a second protein (included to enhance or decrease immunogenicity) can be used. Examples of proteins or polypeptides that could beneficially enhance the immune response if co-expressed include cytokines (e.g., IL-2, IL-12, GM-CSF), cytokine-inducing molecules (e.g., LeIF) or costimulatory molecules. Helper (HTL) epitopes can be joined to intracellular targeting signals and expressed separately from expressed CTL epitopes; this allows direction of the HTL epitopes to a cell compartment different than that of the CTL epitopes. If required, this could facilitate more efficient entry of HTL epitopes into the HLA class II pathway, thereby improving CTL induction. In contrast to HTL or CTL induction, specifically decreasing the immune response by co-expression of immunosuppressive molecules (e.g. TGF-β) may be beneficial in certain diseases).

[0205] Therapeutic quantities of plasmid DNA can be produced for example, by fermentation in E. coli, followed by purification. Aliquots from the working cell bank are used to inoculate growth medium, and grown to saturation in shaker flasks or a bioreactor according to well known techniques. Plasmid DNA can be purified using standard bioseparation technologies such as solid phase anion-exchange resins supplied by QIAGEN, Inc. (Valencia, Calif.). If required, supercoiled DNA can be isolated from the open circular and linear forms using gel electrophoresis or other methods.

[0206] Purified plasmid DNA can be prepared for injection using a variety of formulations. The simplest of these is reconstitution of lyophilized DNA in sterile phosphate-buffer saline (PBS). This approach, known as “naked DNA,” is currently being used for intramuscular (IM) administration in clinical trials. To maximize the immunotherapeutic effects of minigene DNA vaccines, an alternative method for formulating purified plasmid DNA may be desirable. A variety of methods have been described, and new techniques may become available. Cationic lipids can also be used in the formulation (see, e.g., as described by WO 93/24640; Mannino & Gould-Fogerite, BioTechniques 6(7): 682 (1988); U.S. Pat. No. 5,279,833; WO 91/06309; and Felgner, et al., Proc. Nat'l Acad. Sci. USA 84:7413 (1987). In addition, glycolipids, fusogenic liposomes, peptides and compounds referred to collectively as protective, interactive, non-condensing compounds (PINC) could also be complexed to purified plasmid DNA to influence variables such as stability, intramuscular dispersion, or trafficking to specific organs or cell types.

[0207] Target cell sensitization can be used as a functional assay for expression and HLA class I presentation of minigene-encoded CTL epitopes. For example, the plasmid DNA is introduced into a mammalian cell line that is suitable as a target for standard CTL chromium release assays. The transfection method used will be dependent on the final formulation. Electroporation can be used for “naked” DNA, whereas cationic lipids allow direct in vitro transfection. A plasmid expressing green fluorescent protein (GFP) can be co-transfected to allow enrichment of transfected cells using fluorescence activated cell sorting (FACS). These cells are then chromium-51 (⁵¹Cr) labeled and used as target cells for epitope-specific CTL lines; cytolysis, detected by ⁵¹Cr release, indicates both production of, and HLA presentation of, minigene-encoded CTL epitopes.

[0208] In vivo inmmunogenicity is a second approach for functional testing of minigene DNA formulations. Transgenic mice expressing appropriate human HLA proteins are immunized with the DNA product. The dose and route of administration are formulation dependent (e.g., IM for DNA in PBS, intraperitoneal (IP) for lipid-complexed DNA). Twenty-one days after immunization, splenocytes are harvested and restimulated for 1 week in the presence of peptides encoding each epitope being tested. Thereafter, for CTL effector cells, assays are conducted for cytolysis of peptide-loaded, ⁵¹Cr labeled target cells using standard techniques. Lysis of target cells sensitized by HLA loading of peptides corresponding to minigene-encoded epitopes demonstrates DNA vaccine function for in vivo induction of CTLs. Immunogenicity of HTL epitopes is evaluated in transgenic mice in an analogous manner.

[0209] Alternatively, the nucleic acids can be administered using ballistic delivery as described, for instance, in U.S. Pat. No. 5,204,253. Using this technique, particles comprised solely of DNA are administered. In a further alternative embodiment, DNA can be adhered to particles, such as gold particles.

[0210] Minigenes can also be delivered using other bacterial or viral delivery systems well known in the art, e.g., an expression construct encoding epitopes of the invention can be incorporated into a viral vector such as vaccinia.

2. Combinations of CTL Peptides with Helper Pepides

[0211] Vaccine compositions comprising CTL peptides of the invention can be modified to provide desired attributes, such as improved serum half life, broadened population coverage or enhanced immunogenicity.

[0212] For instance, the ability of a peptide to induce CTL activity can be enhanced by linking the peptide to a sequence which contains at least one epitope that is capable of inducing a T helper cell response. The use of T helper epitopes in conjunction with CTL epitopes to enhance immunogenicity is illustrated, for example, in the co-pending applications U.S. Ser. No. 08/820,360, U.S. Ser. No. 08/197,484, and U.S. Ser. No. 08/464,234.

[0213] Although a CTL peptide can be directly linked to a T helper peptide, often CTL epitope/HTL epitope conjugates are linked by a spacer molecule. The spacer is typically comprised of relatively small, neutral molecules, such as amino acids or amino acid mimetics, which are substantially uncharged under physiological conditions. The spacers are typically selected from, e.g., Ala, Gly, or other neutral spacers of nonpolar amino acids or neutral polar amino acids. It will be understood that the optionally present spacer need not be comprised of the same residues and thus may be a hetero- or homo-oligomer. When present, the spacer will usually be at least one or two residues, more usually three to six residues and sometimes 10 or more residues. The CTL peptide epitope can be linked to the T helper peptide epitope either directly or via a spacer either at the amino or carboxy terminus of the CTL peptide. The amino terminus of either the immunogenic peptide or the T helper peptide may be acylated.

[0214] In certain embodiments, the T helper peptide is one that is recognized by T helper cells present in the majority of the population. This can be accomplished by selecting peptides that bind to many, most, or all of the HLA class II molecules. These are known as “loosely HLA-restricted” or “promiscuous” T helper sequences. Examples of amino acid sequences that are promiscuous include sequences from antigens such as tetanus toxoid at positions 830-843 (QYIKANSKFIGITE; SEQ ID NO: 51484), Plasmodium falciparum circumsporozoite (CS) protein at positions 378-398 (DIEKKIAKMEKASSVFNVVNS; SEQ ID NO: 51485), and Streptococcus 18kD protein at positions 116 (GAVDSILGGVATYGAA; SEQ ID NO: 51486). Other examples include peptides bearing a DR 1-4-7 supermotif, or either of the DR3 motifs.

[0215] Alternatively, it is possible to prepare synthetic peptides capable of stimulating T helper lymphocytes, in a loosely HLA-restricted fashion, using amino acid sequences not found in nature (see, e.g., PCT publication WO 95/07707). These synthetic compounds called Pan-DR-binding epitopes (e.g., PADRE®, Epimmune, Inc., San Diego, Calif.) are designed to most preferrably bind most HLA-DR (human HLA class II) molecules. For instance, a pan-DR-binding epitope peptide having the formula: aKXVAAWTLKAAa, where “X” is either cyclohexylalanine, phenylalanine, or tyrosine, and a is either d-alanine or 1-alanine, has been found to bind to most HLA-DR alleles, and to stimulate the response of T helper lymphocytes from most individuals, regardless of their HLA type. An alternative of a pan-DR binding epitope comprises all “L” natural amino acids and can be provided in the form of nucleic acids that encode the epitope.

[0216] HTL peptide epitopes can also be modified to alter their biological properties. For example, they can be modified to include d-amino acids to increase their resistance to proteases and thus extend their serum half life, or they can be conjugated to other molecules such as lipids, proteins, carbohydrates, and the like to increase their biological activity. For example, a T helper peptide can be conjugated to one or more palmitic acid chains at either the amino or carboxyl termini.

3. Combinations of CTL Peptides with T Cell Priming Agents

[0217] In some embodiments it may be desirable to include in the pharmaceutical compositions of the invention at least one component which primes cytotoxic T lymphocytes. Lipids have been identified as agents capable of priming CTL in vivo against viral antigens. For example, palmitic acid residues can be attached to the ε- and α-amino groups of a lysine residue and then linked, e.g., via one or more linking residues such as Gly, Gly-Gly-, Ser, Ser-Ser, or the like, to an immunogenic peptide. The lipidated peptide can then be administered either directly in a micelle or particle, incorporated into a liposome, or emulsified in an adjuvant, e.g., incomplete Freund's adjuvant. In a preferred embodiment, a particularly effective immunogenic composition comprises palmitic acid attached to ε- and α-amino groups of Lys, which is attached via linkage, e.g., Ser-Ser, to the amino terminus of the immunogenic peptide.

[0218] As another example of lipid priming of CTL responses, E. coli lipoproteins, such as tripalmitoyl-S-glycerylcysteinlyseryl-serine (P3CSS) can be used to prime virus specific CTL when covalently attached to an appropriate peptide (see, e.g., Deres, et al., Nature 342:561, 1989). Peptides of the invention can be coupled to P3CSS, for example, and the lipopeptide administered to an individual to specifically prime a CTL response to the target antigen. Moreover, because the induction of neutralizing antibodies can also be primed with P3CSS-conjugated epitopes, two such compositions can be combined to more effectively elicit both humoral and cell-mediated responses.

[0219] CTL and/or HTL peptides can also be modified by the addition of amino acids to the termini of a peptide to provide for ease of linking peptides one to another, for coupling to a carrier support or larger peptide, for modifying the physical or chemical properties of the peptide or oligopeptide, or the like. Amino acids such as tyrosine, cysteine, lysine, glutamic or aspartic acid, or the like, can be introduced at the C— or N-terminus of the peptide or oligopeptide, particularly class I peptides. However, it is to be noted that modification at the carboxyl terminus of a CTL epitope may, in some cases, alter binding characteristics of the peptide. In addition, the peptide or oligopeptide sequences can differ from the natural sequence by being modified by terminal-NH2 acylation, e.g., by alkanoyl (C1-C20) or thioglycolyl acetylation, terminal-carboxyl amidation, e.g., ammonia, methylaamine, etc. In some instances these modifications may provide sites for linking to a support or other molecule.

4. Vaccine Compositions Comprising DC Pulsed with CTL and/or HTL Peptides

[0220] An embodiment of a vaccine composition in accordance with the invention comprises ex vivo administration of a cocktail of epitope-bearing peptides to PBMC, or isolated DC therefrom, from the patient's blood. A pharmaceutical to facilitate harvesting of DC can be used, such as Progenipoietin™ (Monsanto, St. Louis, Mo.) or GM-CSF/IL-4. After pulsing the DC with peptides and prior to reinfusion into patients, the DC are washed to remove unbound peptides. In this embodiment, a vaccine comprises peptide-pulsed DCs which present the pulsed peptide epitopes complexed with HLA molecules on their surfaces.

[0221] The DC can be pulsed ex vivo with a cocktail of peptides, some of which stimulate CTL responses to one or more HBV antigens of interest. Optionally, a helper T cell (HTL) peptide such as a PADRE family molecule, can be included to facilitate the CTL response. Thus, a vaccine in accordance with the invention, preferably comprising epitopes from multiple HBV antigens, is used to treat HBV infection.

L. Administration of Vaccines for Therapeutic or Prophylactic Purposes

[0222] The peptides of the present invention and pharmaceutical and vaccine compositions of the invention are typically used to treat and/or prevent HBV infection. Vaccine compositions containing the peptides of the invention are administered to a patient infected with HBV or to an individual susceptible to, or otherwise at risk for, HBV infection to elicit an immune response against HBV antigens and thus enhance the patient's own immune response capabilities.

[0223] As discussed herein, peptides comprising CTL and/or HTL epitopes of the invention induce immune responses when presented by HLA molecules and contacted with a CTL or HTL specific for an epitope comprised by the peptide. The peptides (or DNA encoding them) can be administered individually or as fusions of one or more peptide sequences. The manner in which the peptide is contacted with the CTL or HTL is not critical to the invention. For instance, the peptide can be contacted with the CTL or HTL either in vivo or in vitro. If the contacting occurs in vivo, the peptide itself can be administered to the patient, or other vehicles, e.g., DNA vectors encoding one or more peptides, viral vectors encoding the peptide(s), liposomes and the like, can be used, as described herein.

[0224] When the peptide is contacted in vitro, the vaccinating agent can comprise a population of cells, e.g., peptide-pulsed dendritic cells, or HPV-specific CTLs, which have been induced by pulsing antigen-presenting cells in vitro with the peptide or by transfecting antigen-presenting cells with a minigene of the invention. Such a cell population is subsequently administered to a patient in a therapeutically effective dose.

[0225] In therapeutic applications, peptide and/or nucleic acid compositions are administered to a patient in an amount sufficient to elicit an effective CTL and/or HTL response to the virus antigen and to cure or at least partially arrest or slow symptoms and/or complications. An amount adequate to accomplish this is defined as “therapeutically effective dose.” Amounts effective for this use will depend on, e.g., the particular composition administered, the manner of administration, the stage and severity of the disease being treated, the weight and general state of health of the patient, and the judgment of the prescribing physician.

[0226] For pharmaceutical compositions, the immunogenic peptides of the invention, or DNA encoding them, are generally administered to an individual already infected with HBV. The peptides or DNA encoding them can be administered individually or as fusions of one or more peptide sequences. HBV-infected patients can be treated with the immunogenic peptides separately or in conjunction with other treatments as appropriate.

[0227] For therapeutic use, administration should generally begin at the first diagnosis of HBV infection. This is followed by boosting doses until at least symptoms are substantially abated and for a period thereafter. The embodiment of the vaccine composition (i.e., including, but not limited to embodiments such as peptide cocktails, polyepitopic polypeptides, minigenes, or HBV antigen-specific CTLs or pulsed dendritic cells) delivered to the patient may vary according to the stage of the disease or the patient's health status. For example, in a patient with chronic HBV infection, a vaccine comprising HBV-specific CTL may be more efficacious in killing HBV-infected cells than alternative embodiments.

[0228] Where susceptible individuals are identified prior to or during infection, the composition can be targeted to them, thus minimizing the need for administration to a larger population.

[0229] The peptide or other compositions used for the treatment or prophylaxis of HBV infection can be used, e.g., in persons who have not manifested symptoms. In this context, it is generally important to provide an amount of the peptide epitope delivered by a mode of administration sufficient to effectively stimulate a cytotoxic T cell response; compositions which stimulate helper T cell responses can also be given in accordance with this embodiment of the invention.

[0230] The dosage for an initial therapeutic immunization generally occurs in a unit dosage range where the lower value is about 1, 5, 50, 500, or 1,000 μg and the higher value is about 10,000; 20,000; 30,000; or 50,000 μg. Dosage values for a human typically range from about 500 μg to about 50,000 μg per 70 kilogram patient. Boosting dosages of between about 1.0 μg to about 50,000 μg of peptide pursuant to a boosting regimen over weeks to months may be administered depending upon the patient's response and condition as determined by measuring the specific activity of CTL and HTL obtained from the patient's blood. Administration should continue until at least clinical symptoms or laboratory tests indicate that the viral infection has been eliminated or reduced and for a period thereafter. The dosages, routes of administration, and dose schedules are adjusted in accordance with methodologies known in the art.

[0231] In certain embodiments, the peptides and compositions of the present invention are employed in serious disease states, that is, life-threatening or potentially life threatening situations. In such cases, as a result of the minimal amounts of extraneous substances and the relative nontoxic nature of the peptides in preferred compositions of the invention, it is possible and may be felt desirable by the treating physician to administer substantial excesses of these peptide compositions relative to these stated dosage amounts.

[0232] The vaccine compositions of the invention can also be used purely as prophylactic agents. Generally the dosage for an initial prophylactic immunization generally occurs in a unit dosage range where the lower value is about 1, 5, 50, 500, or 1000 μg and the higher value is about 10,000; 20,000; 30,000; or 50,000 μg. Dosage values for a human typically range from about 500 μg to about 50,000 μg per 70 kilogram patient. This is followed by boosting dosages of between about 1.0 μg to about 50,000 μg of peptide administered at defined intervals from about four weeks to six months after the initial administration of vaccine. The immunogenicity of the vaccine can be assessed by measuring the specific activity of CTL and HTL obtained from a sample of the patient's blood.

[0233] The pharmaceutical compositions for therapeutic treatment are intended for parenteral, topical, oral, intrathecal, or local (e.g. as a cream or topical ointment) administration. Preferably, the pharmaceutical compositions are administered parentally, e.g., intravenously, subcutaneously, intradermally, or intramuscularly. Thus, the invention provides compositions for parenteral administration which comprise a solution of the immunogenic peptides dissolved or suspended in an acceptable carrier, preferably an aqueous carrier. A variety of aqueous carriers may be used, e.g., water, buffered water, 0.8% saline, 0.3% glycine, hyaluronic acid and the like. These compositions may be sterilized by conventional, well known sterilization techniques, or may be sterile filtered. The resulting aqueous solutions may be packaged for use as is, or lyophilized, the lyophilized preparation being combined with a sterile solution prior to administration. The compositions may contain pharmaceutically acceptable auxiliary substances as required to approximate physiological conditions, such as pH-adjusting and buffering agents, tonicity adjusting agents, wetting agents, preservatives, and the like, for example, sodium acetate, sodium lactate, sodium chloride, potassium chloride, calcium chloride, sorbitan monolaurate, triethanolamine oleate, etc.

[0234] The concentration of peptides of the invention in the pharmaceutical formulations can vary widely, i.e., from less than about 0.1%, usually at or at least about 2% to as much as 20% to 50% or more by weight, and will be selected primarily by fluid volumes, viscosities, etc., in accordance with the particular mode of administration selected.

[0235] A human unit dose form of the peptide composition is typically included in a pharmaceutical composition that comprises a human unit dose of an acceptable carrier, preferably an aqueous carrier, and is administered in a volume of fluid that is known by those of skill in the art to be used for administration of such compositions to humans (see, e.g., Remington's Pharmaceutical Sciences, 17th Edition, A. Gennaro, Editor, Mack Publising Co., Easton, Pa., 1985).

[0236] The peptides of the invention, and/or nucleic acids encoding the peptides, can also be administered via liposomes, which may also serve to target the peptides to a particular tissue, such as lymphoid tissue, or to target selectively to infected cells, as well as to increase the half-life of the peptide composition. Liposomes include emulsions, foams, micelles, insoluble monolayers, liquid crystals, phospholipid dispersions, lamellar layers and the like. In these preparations, the peptide to be delivered is incorporated as part of a liposome, alone or in conjunction with a molecule which binds to a receptor prevalent among lymphoid cells, such as monoclonal antibodies which bind to the CD45 antigen, or with other therapeutic or immunogenic compositions. Thus, liposomes either filled or decorated with a desired peptide of the invention can be directed to the site of lymphoid cells, where the liposomes then deliver the peptide compositions. Liposomes for use in accordance with the invention are formed from standard vesicle-forming lipids, which generally include neutral and negatively charged phospholipids and a sterol, such as cholesterol. The selection of lipids is generally guided by consideration of, e.g., liposome size, acid lability and stability of the liposomes in the blood stream. A variety of methods are available for preparing liposomes, as described in, e.g., Szoka, et al., Ann. Rev. Biophys. Bioeng. 9:467 (1980), and U.S. Pat. Nos. 4,235,871, 4,501,728, 4,837,028, and 5,019,369.

[0237] For targeting cells of the immune system, a ligand to be incorporated into the liposome can include, e.g., antibodies or fragments thereof specific for cell surface determinants of the desired immune system cells. A liposome suspension containing a peptide may be administered intravenously, locally, topically, etc. in a dose which varies according to, inter alia, the manner of administration, the peptide being delivered, and the stage of the disease being treated.

[0238] For solid compositions, conventional nontoxic solid carriers may be used which include, for example, pharmaceutical grades of mannitol, lactose, starch, magnesium stearate, sodium saccharin, talcum, cellulose, glucose, sucrose, magnesium carbonate, and the like. For oral administration, a pharmaceutically acceptable nontoxic composition is formed by incorporating any of the normally employed excipients, such as those carriers previously listed, and generally 10-95% of active ingredient, that is, one or more peptides of the invention, and more preferably at a concentration of 25%-75%.

[0239] For aerosol administration, the immunogenic peptides are preferably supplied in finely divided form along with a surfactant and propellant. Typical percentages of peptides are 0.01%-20% by weight, preferably 1%-10%. The surfactant must, of course, be nontoxic, and preferably soluble in the propellant. Representative of such agents are the esters or partial esters of fatty acids containing from 6 to 22 carbon atoms, such as caproic, octanoic, lauric, palmitic, stearic, linoleic, linolenic, olesteric and oleic acids with an aliphatic polyhydric alcohol or its cyclic anhydride. Mixed esters, such as mixed or natural glycerides may be employed. The surfactant may constitute 0.1%-20% by weight of the composition, preferably 0.25-5%. The balance of the composition is ordinarily propellant. A carrier can also be included, as desired, as with, e.g., lecithin for intranasal delivery.

M. Kits

[0240] The peptide and nucleic acid compositions of this invention can be provided in kit form together with instructions for vaccine administration. Typically the kit would include desired peptide compositions in a container, preferably in unit dosage form and instructions for administration. An alternative kit would include a minigene construct with desired nucleic acids of the invention in a container, preferably in unit dosage form together with instructions for administration. Lymphokines such as IL-2 or IL-12 may also be included in the kit. Other kit components that may also be desirable include, for example, a sterile syringe, booster dosages, and other desired excipients.

[0241] Epitopes in accordance with the present invention were successfully used to induce an immune response. Immune responses with these epitopes have been induced by administering the epitopes in various forms. The epitopes have been administered as peptides, as nucleic acids, and as viral vectors comprising nucleic acids that encode the epitope(s) of the invention. Upon administration of peptide-based epitope forms, immune responses have been induced by direct loading of an epitope onto an empty HLA molecule that is expressed on a cell, and via internalization of the epitope and processing via the HLA class I pathway; in either event, the HLA molecule expressing the epitope was then able to interact with and induce a CTL response. Peptides can be delivered directly or using such agents as liposomes. They can additionally be delivered using ballistic delivery, in which the peptides are typically in a crystalline form. When DNA is used to induce an immune response, it is administered either as naked DNA, generally in a dose range of approximately 1-5 mg, or via the ballistic “gene gun” delivery, typically in a dose range of approximately 10-100 μg. The DNA can be delivered in a variety of conformations, e.g., linear, circular etc. Various viral vectors have also successfully been used that comprise nucleic acids which encode epitopes in accordance with the invention.

[0242] Accordingly compositions in accordance with the invention exist in several forms. Embodiments of each of these composition forms in accordance with the invention have been successfully used to induce an immune response.

[0243] One composition in accordance with the invention comprises a plurality of peptides. This plurality or cocktail of peptides is generally admixed with one or more pharmaceutically acceptable excipients. The peptide cocktail can comprise multiple copies of the same peptide or can comprise a mixture of peptides. The peptides can be analogs of naturally occurring epitopes. The peptides can comprise artificial amino acids and/or chemical modifications such as addition of a surface active molecule, e.g., lipidation; acetylation, glycosylation, biotinylation, phosphorylation etc. The peptides can be CTL or HTL epitopes. In a preferred embodiment the peptide cocktail comprises a plurality of different CTL epitopes and at least one HTL epitope. The HTL epitope can be naturally or non-naturally (e.g., PADRE®, Epimmune Inc., San Diego, Calif.). The number of distinct epitopes in an embodiment of the invention is generally a whole unit integer from one through one hundred fifty (e.g., 1, 2, 3, 4, 5, 6, 7, 8, 9, 10, 11, 12, 13, 14, 15, 16, 17, 18, 19, 20, 21, 22, 23, 24, 25, 26, 27, 28, 29, 30, 31, 32, 33, 34, 35, 36, 37, 38, 39, 40, 41, 42, 43, 44, 45, 46, 47, 48, 49, 50, 51, 52, 53, 54, 55, 56, 57, 58, 59, 60, 61, 62, 63, 64, 65, 66, 67, 68, 69, 70, 71, 72, 73, 74, 75, 76, 77, 78, 79, 80, 81, 82, 83, 84, 85, 86, 87, 88, 89, 90, 91, 92, 93, 94, 95, 96, 97, 98, 99, 100, or 150).

[0244] An additional embodiment of a composition in accordance with the invention comprises a polypeptide multi-epitope construct, i.e., a polyepitopic peptide. Polyepitopic peptides in accordance with the invention are prepared by use of technologies well-known in the art. By use of these known technologies, epitopes in accordance with the invention are connected one to another. The polyepitopic peptides can be linear or non-linear, e.g., multivalent. These polyepitopic constructs can comprise artificial amino acids, spacing or spacer amino acids, flanking amino acids, or chemical modifications between adjacent epitope units. The polyepitopic construct can be a heteropolymer or a homopolymer. The polyepitopic constructs generally comprise epitopes in a quantity of any whole unit integer between 2-150 (e.g., 2, 3, 4, 5, 6, 7, 8, 9, 10, 11, 12, 13, 14, 15, 16, 17, 18, 19, 20, 21, 22, 23, 24, 25, 26, 27, 28, 29, 30, 31, 32, 33, 34, 35, 36, 37, 38, 39, 40, 41, 42, 43, 44, 45, 46, 47, 48, 49, 50, 51, 52, 53, 54, 55, 56, 57, 58, 59, 60, 61, 62, 63, 64, 65, 66, 67, 68, 69, 70, 71, 72, 73, 74, 75, 76, 77, 78, 79, 80, 81, 82, 83, 84, 85, 86, 87, 88, 89, 90, 91, 92, 93, 94, 95, 96, 97, 98, 99, 100, or 150). The polyepitopic construct can comprise CTL and/or HTL epitopes. One or more of the epitopes in the construct can be modified, e.g., by addition of a surface active material, e.g. a lipid, or chemically modified, e.g., acetylation, etc. Moreover, bonds in the multiepitopic construct can be other than peptide bonds, e.g., covalent bonds, ester or ether bonds, disulfide bonds, hydrogen bonds, ionic bonds etc.

[0245] Alternatively, a composition in accordance with the invention comprises construct which comprises a series, sequence, stretch, etc., of amino acids that have homology to (i.e., corresponds to or is contiguous with) to a native sequence. This stretch of amino acids comprises at least one subsequence of amino acids that, if cleaved or isolated from the longer series of amino acids, fictions as an HTA class I or HLA class II epitope in accordance with the invention. In this embodiment, the peptide sequence is modified, so as to become a construct as defined herein, by use of any number of techniques known or to be provided in the art. The polyepitopic constructs can contain homology to a native sequence in any whole unit integer increment from 70-100%, e.g., 70, 71, 72, 73, 74, 75, 76, 77, 78, 79, 80, 81, 82, 83, 84, 85, 86, 87, 88, 89, 90, 91, 92, 93, 94, 95, 96, 97, 98, 99, or, 100 percent.

[0246] A further embodiment of a composition in accordance with the invention is an antigen presenting cell that comprises one or more epitopes in accordance with the invention. The antigen presenting cell can be a “professional” antigen presenting cell, such as a dendritic cell. The antigen presenting cell can comprise the epitope of the invention by any means known or to be determined in the art. Such means include pulsing of dendritic cells with one or more individual epitopes or with one or more peptides that comprise multiple epitopes, by nucleic acid administration such as ballistic nucleic acid delivery or by other techniques in the art for administration of nucleic acids, including vector-based, e.g. viral vector, delivery of nucleic acids.

[0247] Further embodiments of compositions in accordance with the invention comprise nucleic acids that encode one or more peptides of the invention, or nucleic acids which encode a polyepitopic peptide in accordance with the invention. As appreciated by one of ordinary skill in the art, various nucleic acids compositions will encode the same peptide due to the redundancy of the genetic code. Each of these nucleic acid compositions falls within the scope of the present invention. This embodiment of the invention comprises DNA or RNA, and in certain embodiments a combination of DNA and RNA. It is to be appreciated that any composition comprising nucleic acids that will encode a peptide in accordance with the invention or any other peptide based composition in accordance with the invention, falls within the scope of this invention.

[0248] It is to be appreciated that peptide-based forms of the invention (as well as the nucleic acids that encode them) can comprise analogs of epitopes of the invention generated using principles already known, or to be known, in the art. Principles related to analoging are now known in the art, and are disclosed herein; moreover, analoging principles (heteroclitic analoging) are disclosed in co-pending application serial number U.S. Ser. No. 09/226,775 filed 6 Jan. 1999. Generally the compositions of the invention are isolated or purified.

### EXAMPLES

[0249] The invention will be described in greater detail by way of specific examples. The following examples are offered for illustrative purposes, and are not intended to limit the invention in any manner. Those of skill in the art will readily recognize a variety of non-critical parameters that can be changed or modified to yield alternative embodiments in accordance with the invention.

### Example 1

### HLA Class I and Class II Binding Assays

[0250] The following example of peptide binding to HLA molecules demonstrates quantification of binding affinities of HLA class I and class II peptides. Binding assays can be performed with peptides that are either motif-bearing or not motif-bearing.

[0251] Cell lysates were prepared and HLA molecules purified in accordance with disclosed protocols (Sidney et al., Current Protocols in Immunology 18.3.1 (1998); Sidney, et al., J. Immunol. 154:247 (1995); Sette, et al., Mol. Immunol. 31:813 (1994)). The cell lines used as sources of HLA molecules and the antibodies used for the extraction of the HLA molecules from the cell lysates are also described in these publications.

[0252] Epstein-Barr virus (EBV)-transformed homozygous cell lines, fibroblasts, CIR, or 721.221-transfectants were used as sources of HLA class I molecules. These cells were maintained in vitro by culture in RPMI 1640 medium supplemented with 2 mM L-glutamine (GIBCO, Grand Island, N.Y.), 50 μM 2-ME, 100 μg/ml of streptomycin, 100 U/ml of penicillin (Irvine Scientific) and 10% heat-inactivated FCS (Irvine Scientific, Santa Ana, Calif.). Cells were grown in 225-cm2 tissue culture flasks or, for large-scale cultures, in roller bottle apparatuses.

[0253] Cell lysates were prepared as follows. Briefly, cells were lysed at a concentration of 10⁸ cells/ml in 50 mM Tris-HCl, pH 8.5, containing 1% Nonidet P-40 (Fluka Biochemika, Buchs, Switzerland), 150 mM NaCl, 5 mM EDTA, and 2 mM PMSF. Lysates were cleared of debris and nuclei by centrifugation at 15,000×g for 30 min.

[0254] HLA molecules were purified from lysates by affinity chromatography. Lysates were passed twice through two pre-columns of inactivated Sepharose CL4-B and protein A-Sepharose. Next, the lysate was passed over a column of Sepharose CL-4B beads coupled to an appropriate antibody. The anti-HLA column was then washed with 10-column volumes of 10 mM Tris-HCL, pH 8.0, in 1% NP-40, PBS, 2-column volumes of PBS, and 2-column volumes of PBS containing 0.4% n-octylglucoside. Finally, MHC molecules were eluted with 50 mM diethylamine in 0.15M NaCl containing 0.4% n-octylglucoside, pH 11.5. A 1/25 volume of 2.0M Tris, pH 6.8, was added to the eluate to reduce the pH to ˜8.0. Eluates were then concentrated by centrifugation in Centriprep 30 concentrators at 2000 rpm (Amicon, Beverly, Mass.). Protein content was evaluated by a BCA protein assay (Pierce Chemical Co., Rockford, Ill.) and confirmed by SDS-PAGE.

[0255] A detailed description of the protocol utilized to measure the binding of peptides to Class I and Class II MHC has been published (Sette et al., Mol. Immunol. 31:813, 1994; Sidney et al., in Current Protocols in Immunology, Margulies, Ed., John Wiley & Sons, New York, Section 18.3, 1998). Briefly, purified MHC molecules (5 to 500 nM) were incubated with various unlabeled peptide inhibitors and 1-10 nM 125I-radiolabeled probe peptides for 48 h in PBS containing 0.05% Nonidet P-40 (NP40) (or 20% w/v digitonin for H-2 IA assays) in the presence of a protease inhibitor cocktail. The final concentrations of protease inhibitors (each from CalBioChem, La Jolla, Calif.) were 1 mM PMSF, 1.3 nM 1.10 phenanthroline, 73 μM pepstatin A, 8mM EDTA, 6 mM N-ethylmaleimide (for Class II assays), and 200 μM N alpha-p-tosyl-L-lysine chloromethyl ketone (TLCK). All assays were performed at pH 7.0 with the exception of DRB1*0301, which was performed at pH 4.5, and DRB1*1601 (DR2w21β1) and DRB4*0101 (DRw53), which were performed at pH 5.0. pH was adjusted as described elsewhere (see Sidney et al., in Current Protocols in Immunology, Margulies, Ed., John Wiley & Sons, New York, Section 18.3, 1998).

[0256] Following incubation, MHC-peptide complexes were separated from free peptide by gel filtration on 7.8 mm×15 cm TSK200 columns (TosoHaas 16215, Montgomeryville, Pa.), eluted at 1.2 mls/min with PBS pH 6.5 containing 0.5% NP40 and 0.1% NaN3. Because the large size of the radiolabeled peptide used for the DRB1*1501 (DR2w2β1) assay makes separation of bound from unbound peaks more difficult under these conditions, all DRB1*1501 (DR2w2β1) assays were performed using a 7.8 mm×30 cm TSK2000 column eluted at 0.6 mls/min. The eluate from the TSK columns was passed through a Beckman 170 radioisotope detector, and radioactivity was plotted and integrated using a Hewlett-Packard 3396A integrator, and the fraction of peptide bound was determined.

[0257] Radiolabeled peptides were iodinated using the chloramine-T method. Representative radiolabeled probe peptides utilized in each assay, and its assay specific IC₅₀ nM, are summarized in Tables IV and V. Typically, in preliminary experiments, each MHC preparation was titered in the presence of fixed amounts of radiolabeled peptides to determine the concentration of HLA molecules necessary to bind 10-20% of the total radioactivity. All subsequent inhibition and direct binding assays were performed using these HLA concentrations.

[0258] Since under these conditions [label]<[HLA] and IC₅₀≧[HLA], the measured IC₅₀ values are reasonable approximations of the true K_{D} values. Peptide inhibitors are typically tested at concentrations ranging from 120 μg/ml to 1.2 ng/ml, and are tested in two to four completely independent experiments. To allow comparison of the data obtained in different experiments, a relative binding figure is calculated for each peptide by dividing the IC₅₀ of a positive control for inhibition by the IC₅₀ for each tested peptide (typically unlabeled versions of the radiolabeled probe peptide). For inter-experiment comparisons, relative binding values are compiled. These values can subsequently be converted back into IC₅₀ nM values by dividing the IC₅₀ nM of the positive controls for inhibition by the relative binding of the peptide of interest. This method of data compilation has proven to be the most accurate and consistent for comparing peptides that have been tested on different days, or with different lots of purified MHC.

[0259] Because the antibody used for HLA-DR purification (LB3.1) is α-chain specific, β1 molecules are not separated from β3 (and/or β4 and β5) molecules. The β1 specificity of the binding assay is obvious in the cases of DRB1*0101 (DR1), DRB1*0802 (DR8w2), and DRB1*0803 (DR8w3), where no β3 is expressed. It has also been demonstrated for DRB1*0301 (DR3) and DRB3*0101 (DR52a), DRB1*0401 (DR4w4), DRB1*0404 (DR4w14), DRB1*0405 (DR4w15), DRB1*1101 (DR5), DRB1*1201 (DR5w12), DRB1*1302 (DR6w19) and DRB1*0701 (DR7). The problem of β chain specificity for DRB1*1501 (DR2w2β1), DRB5*0101 (DR2w2β2), DRB1*1601 (DR2w21β1), DRB5*0201 (DR51Dw21), and DRB4*0101 (DRw53) assays is circumvented by the use of fibroblasts. Development and validation of assays with regard to DRP molecule specificity have been described previously (see, e.g., Southwood et al., J. Immunol. 160:3363-3373, 1998).

[0260] Binding assays as outlined above may be used to analyze supermotif and/or motif-bearing epitopes as, for example, described in Example 2.

### Example 2

### Identification of Conserved HLA Supermotif CTL Candidate Epitopes

[0261] Vaccine compositions of the invention can include multiple epitopes that comprise multiple HLA supermotifs or motifs to achieve broad population coverage. This example illustrates the identification of supermotif-bearing epitopes for the inclusion in such a vaccine composition. Calculation of population coverage was performed using the strategy described below. Epitopes were then selected to bear an HLA-A2, -A3, or -B7 supermotif or an HLA-A1 or -A24 motif.

Computer Searches and Algorthims for Identification of Supermotif and/or Motif-Bearing Epitopes

[0262] Computer searches for epitopes bearing HLA Class I or Class II supermotifs or motifs were performed as follows. All translated HBV isolate sequences were analyzed using a text string search software program, e.g., MotifSearch 1.4 (D. Brown, San Diego) to identify potential peptide sequences containing appropriate HLA binding motifs; alternative programs are readily produced in accordance with information in the art in view of the motif/supermotif disclosure herein. Furthermore, such calculations can be made mentally. Identified A2-, A3-, and DR-supermotif sequences were scored using polynomial algorithms to predict their capacity to bind to specific HLA-Class I or Class II molecules. These polynomial algorithms take into account both extended and refined motifs (that is, to account for the impact of different amino acids at different positions), and are essentially based on the premise that the overall affinity (or ΔG) of peptide-HLA molecule interactions can be approximated as a linear polynomial function of the type:
“ΔG”=a1i×a2i×a3i . . . x ani

[0263] where aji is a coefficient which represents the effect of the presence of a given amino acid (j) at a given position (i) along the sequence of a peptide of n amino acids. The crucial assumption of this method is that the effects at each position are essentially independent of each other (i.e., independent binding of individual side-chains). When residue j occurs at position i in the peptide, it is assumed to contribute a constant amount ji to the free energy of binding of the peptide irrespective of the sequence of the rest of the peptide. This assumption is justified by studies from our laboratories that demonstrated that peptides are bound to MHC and recognized by T cells in essentially an extended conformation (data omitted herein).

[0264] The method of derivation of specific algorithm coefficients has been described in Gulukota et al., i J. Mol. Biol. 267:1258-126, 1997; (see also Sidney et al., Human Immunol. 45:79-93, 1996; and Southwood et al., J. Immunol. 160:3363-3373, 1998). Briefly, for all i positions, anchor and non-anchor alike, the geometric mean of the average relative binding (ARB) of all peptides carrying j is calculated relative to the remainder of the group, and used as the estimate of ji. For Class II peptides, if multiple alignments are possible, only the highest scoring alignment is utilized, following an iterative procedure. To calculate an algorithm score of a given peptide in a test set, the ARB values corresponding to the sequence of the peptide are multiplied. If this product exceeds a chosen threshold, the peptide is predicted to bind. Appropriate thresholds are chosen as a function of the degree of stringency of prediction desired.

[0265] Selection of HLA-A2 Supertype Cross-Reactive Peptides

[0266] Complete sequences from 20 HBV isolates were aligned, then scanned, utilizing a customized computer program, to identify conserved 9- and 10-mer sequences containing the HLA-A2-supertype main anchor specificity.

[0267] A total of 150 conserved and motif-positive sequences were identified. These peptides were then evaluated for the presence of A*0201 preferred secondary anchor residues using an A*0201-specific polynomial algorithm. A total of 85 conserved, motif-positive sequences were selected and synthesized.

[0268] These 85 conserved, motif-containing 9- and 10-mer peptides were then tested for their capacity to bind purified HLA-A*0201 molecules in vitro. Thirty-four peptides were found to be good A*0201 binders (IC₅₀≦500 nM); 15 were high binders (IC₅₀≦50 nM) and 19 were intermediate binders (IC₅₀ of 50-500 nM) (Table XXVI).

[0269] In the course of independent analyses, 25 conserved, HBV-derived, 8 or 11-mer sequences with appropriate A2-supertype main anchors were also synthesized and tested for A*0201 binding. One peptide, HBV env 259 11-mer (peptide 1147.14), bound A*0201 with an IC₅₀ of 500 nM, or less, and has been included in Table XXVI. Also shown in Table XXVI is an analog peptide, representing a single substitution of the HBV pol 538 9-mer peptide, which binds A*0201 with an IC₅₀ of 5.1 nM (see below).

[0270] Thirty of the 36 A*0201 binders were subsequently tested for the capacity to bind to additional A2-supertype alleles (A*0202, A*0203, A*0206, and A*6802). As shown in Table XXVI, 15/30 (50%) peptides were found to be A2-supertype cross-reactive binders, binding at least 3 of the 5 A2-supertype alleles tested. These 15 peptides were selected for further analysis.

Selection of HLA-A3 Supermotif-Bearing Epitopes

[0271] The sequences from the same 20 isolates were also examined for the presence of conserved peptides with the HLA-A3-supermotif primary anchors. A total of 80 conserved 9- or 10-mer motif-containing sequences were identified. Further analysis using the A03 and A11 algorithms identified 40 sequences which scored high in either or both algorithms. Thirty-six of the corresponding peptides were synthesized and tested for binding to HLA-A*03 and HLA-A*11, the two most prevalent A3-supertype alleles. Twenty-three peptides were identified which bound A3 and/or A11 with affinities or IC₅₀ values of ≦500 nM (Table XXVII).

[0272] In the course of an independent series of studies 30 HBV-derived 8-mer, and 24 11-mer sequences, conserved in 75% or more of the isolates, were selected and tested for A*03 and A*11 binding. Four 8-mers and 9 11-mers were found to bind either or both alleles (Table XXVII). Finally, four 9-mer, and one 10-mer, conserved HBV-derived peptides not selected using the search criteria outlined above, but which have been shown to bind A*03 and/or A*11, have been identified, and are included in Table XXVII. Two of these peptides contain non-canonical anchors (peptides 20.0131, and 20.0130), and the other 3 are algorithm negative (peptides 1142.05, 1099.03, and 1090.15).

[0273] Thirty-eight of the 41 peptides binding A*03 and/or A*11 were subsequently tested for binding crossreactivity to the other common A3-supertype alleles (A*3101, A*3301, and A*6801). It was found that 17 of these peptides were A3-supertype cross-reactive, binding at least 3 of the 5 A3-supertype alleles tested (Table XXVI).

Selection of HLA-B7 Supermotif Bearing Epitopes

[0274] When the same 20 isolates were also analyzed for the presence of conserved 9- or 10-mer peptides with the HLA-B7-supermotif, 46 sequences were identified. Thirty-four of the corresponding peptides were synthesized and tested for binding to HLA-B*0702, the most common B7-supertype allele. Nine peptides bound B*0702 with an IC₅₀ value of ≦500 nM (Table XXVIII). These 9 peptides were then tested for binding to other common B7-supertype alleles (B*3501, B*51, B*5301, and B*5401). Five of the 9 B*0702 binders were capable of binding to 3 or more of the 5 B7-supertype alleles tested.

[0275] In separate studies investigating the secondary anchor requirements of B7-supertype alleles, all available peptides with the B7-supermotif were tested for binding to all B7 supertype alleles. As a result, all 34 peptides described above were also tested for binding to other B7-supertype alleles. These experiments identified an additional 10 peptides which bound at least one B7-supertype allele with an IC₅₀ value ≦500 nM, including 2 peptides which bound 3 or more alleles. These 10 peptides are also shown in Table XXVIII.

[0276] Because of the low numbers of conserved B7-supertype degenerate HBV-derived 9- and 10-mer peptides, compared to the A2- and A3-supertypes, the 20 isolates were again examined to identify conserved, motif-containing 8- and 11-mers. This re-scan identified 51 peptides. Thirty-one of these were synthesized and tested for binding to each of the 5 most common B7-supertype alleles. Nineteen 8- and 11-mer peptides bound with high or intermediate affinity to at least one B7-supertype allele (IC₅₀<500 nM) (Table XXVIII). Two peptides were degenerate binders, binding 3 of the 5 alleles tested.

[0277] In summary, a total of 9 HBV-derived peptides, conserved in 75% or more of the isolates analyzed, have been identified which are degenerate B7-supertype binders (Table XXVIII).

Selection of A1 and A24 Motif-Bearing Epitopes

[0278] To further increase population coverage, HLA-A1 and -A24 epitopes have been incorporated into the present analysis. A1 is, on average, present in 12%, and A24 is present in approximately 29%, of the population across five different major ethnic groups (Caucasian, North American Black, Chinese, Japanese, and Hispanic). Combined, these alleles would be represented with an average frequency of 39% in these same populations. The total coverage across the major ethnicities when A1 and A24 are combined with the coverage of the A2-, A3- and B7-supertype alleles is >95.4%; by comparison, coverage by combing the A2-, A3-, and B7-supertypes is 86.2%.

[0279] Systematic analyses of HBV for A1 and A24 binders have yet to be completed. However, in the course of independent studies, 15 conserved HBV-derived peptides have been identified that bind A*0101 with IC₅₀ less than 500 nM (Table XXIX); 7 of these bind with IC₅₀ less than 100 nM. In a similar context, 14 conserved A*2402 binding HBV-derived peptides have also been identified, 6 of which bind A*2402 with IC₅₀ less than 100 nM (Table XXIX).

### Example 3

### Confirmation of Immunogenicity

Evaluation of A*0201 Immunogenicity

[0280] The immunogenicity analysis of the 15 HBV-derived HLA-A2 supertype cross-reactive peptides identified above is summarized in Table XXX. Peptides were screened for immunogenicity in at least one of three systems. Peptides were screened for the induction of primary antigen-specific CTL in vitro using human PBMC (Wentworth et al., Molec. Immunol. 32:603, 1995); this data is indicated as “primary CTL” in Table XXX.

[0281] The protocol for in vitro induction of primary antigen-specific CTL from human PBMC has been described by Wentworth et al (Wentworth et al., Molec. Immunol. 32:603, 1995). PBMC from normal donors which had been enriched for CD8⁺ T cells were incubated with peptide loaded antigen-presenting cells (SAC-I activated PBMCs) in the presence of IL-7. After seven days cultures were restimulated using irradiated autologous adherent cells pulsed with peptide and then tested for cytotoxic activity seven days later.

[0282] In addition, HLA transgenic mice were used to evaluate peptide immunogenicity; this data is indicated as “transgenic CTL” in Table XXX. Previous studies have shown that CTL induced in A*0201/Kb transgenic mice exhibit specificity similar to CTL induced in humans (Vitiello et al., J. Exp. Med. 173:1007, 1991; Wentworth et al., Eur. J. Immunol. 26:97, 1996).

[0283] CTL induction in transgenic mice following peptide immunization has been described by Vitiello et al. (Vitiello et al., J. Exp. Med. 173:1007, 1991) and Alexander et al. (Alexander et al., J. Immunol. 159:4753, 1997). Briefly, synthetic peptides (50 μg/mouse) and the helper epitope HBV core 128 (140 μg/mouse) were emulsified in incomplete Freund's adjuvant (IFA) and injected subcutaneously at the base of the tail. Eleven days after injection, splenocytes were incubated in the presence of peptide-loaded syngenic LPS blasts. After six days cultures were assayed for cytotoxic activity using peptide-pulsed targets.

[0284] Peptides were also tested for the ability to stimulate recall CTL responses in acutely infected HBV patients (Bertoni et al., J. Clin. Invest. 100:503, 1997; Rehermann et al., J. Clin. Invest. 97:1655-1665, 1996; Nayersina et al., J. Immunol. 150:4659, 1993); these data are indicated as “patient CTL” in Table XXX. Patient immunogenicity data is particularly informative as it indicates that a peptide is recognized during the course of a natural infection. These data demonstrate that a peptide is processed and presented in human cells that would represent the targets for CTL. Moreover, this data is especially relevant for vaccine design as the induction of CTL responses in patients has been correlated to the resolution of infection.

[0285] For the evaluation of recall CTL responses, screening was carried out as described by Bertoni et al. (Bertoni et al., J. Clin. Invest. 100:503, 1997). Briefly, PBMC from patients acutely infected with HBV were cultured in the presence of 10 μg/ml of synthetic peptide. After seven days, the cultures were restimulated with peptide. The cultures were assayed for cytotoxic activity on day 14 using target cells pulsed with peptide.

[0286] Of the 15 A2 supertype binding peptides, 11 were found to be immunogenic in at least one of the systems utilized. Five of the 11 peptides had previously been identified in the patients with acute HBV (Bertoni et al., J. Clin. Invest. 100:503, 1997). Five additional degenerate peptides (1069.06, 1090.77, 1147.14, 927.42 and 927.46) induced CTL responses in HLA-A*0201 transgenic mice. The 11 immunogenic supertype cross-reactive peptides are encoded by three HBV antigens; core, envelope and polymerase.

[0287] This set of 11 immunogenic A2-supermotif-bearing epitopes includes one analog peptide, 1090.77. The wild type peptide, 1090.14, from which this analog is derived is A2-supertype non-cross-reactive, but has been shown to be recognized in recall CTL L responses from acute HBV patients, and to be immunogenic in HLA-A*0201 transgenic mice as well as primary human cultures (Table XXX). Further studies addressing the cross recognition of the wild type peptide 1090.14 and the 1090.77 analog are described in detail below.

[0288] In the course of independent analyses, 14 of the non-cross-reactive peptides shown in Table XXXb, including 1090.14, were found to be immunogenic in at least one system. Five peptides of these peptides were recognized in patients; 4 peptides induced CTL in transgenic mice.

[0289] In conclusion, 11 A2-supertype cross-reactive peptides have been identified that are capable of exhibiting immunogenicity in at least one of the three systems examined.

[0290] Seven of the 17 A3-supertype cross-reactive peptides have been evaluated for immunogenicity (Table XXXI). As described in the previous section, A3-supermotif-bearing peptides were screened using primary cultures, patient responses, or HLA-A11 transgenic mice (Alexander et al., J. Immunol. 159:4753, 1997). With the exception of peptide 1.0219, all of the conserved cross-reactive peptides listed in Table insert table XXXI were found to be immunogenic.

[0291] Additionally, a poorly conserved peptide (1150.51; 40% conserved) which exhibits cross-reactive supertype binding was found to be immunogenic in transgenic mice, and has been included in Table XXXI. Two other conserved, but non-cross-reactive, peptides have also been shown to be recognized in acutely infected HBV patients (Bertoni et al., J. Clin. Invest. 100:503, 1997). These epitiopes are shown in Table XXXI.

[0292] It is notable that for 7 of the 8 conserved immunogenic HBV-derived A3-supermotif-bearing epitopes, including all 6 of the cross-reactive peptides, positive data was obtained in patients. These epitopes are predominantly derived from the polymerase protein sequence, with only one epitope being derived from the core protein sequence. While a number of cross-reactive peptides have been identified in the X antigen (Table XXXI), to date these peptides have not been screened for immunogenicity.

[0293] In summary, 7 A3-supermotif-bearing, cross-reactive peptides have been identified that are recognized by CTL in acutely infected patients, or induce CTL in HLA-transgenic mict.

Evaluation of B7 Immunogenicity

[0294] The immunogenicity studies involving the HBV-derived HLA-B7-supermotif-bearing, cross-reactive peptides is summarized in Table XXXII. HLA-B7 peptides were screened exclusively in human systems measuring responses in either primary cultures or acutely infected HBV patients. Of the 7 degenerate peptides screened, 4 were shown to be immunogenic. One non-crossreactive peptide (XRN<3), 1147.04, was also shown to be recognized in acutely infected HBV patients (Bertoni et al., J. Clin. Invest. 100:503, 1997; see TableXXXII).

[0295] In summary, 5 conserved HBV-derived B7-supermotif-bearing epitopes that are recognized in acutely infected HBV patients have been identified. These epitopes afford coverage of 4 different HBV antigens (core, envelope, polymerase and X).

### Example 4

### Implementation of the Extended Supermotif to Improve the Binding Capacity of Native Peptides by Creating Analogs

[0296] HLA motifs and supernotifs (comprising primary and/or secondary residues) are useful in preparing highly cross-reactive native peptides, as demonstrated herein. Moreover, the definition of HLA motifs and supermotifs also allows one to engineer highly cross-reactive epitopes by identifying residues within a native peptide sequence which can be analoged, or “fixed”, to confer upon a peptide certain characteristics, e.g., greater cross-reactivity within the group of HLA molecules that make-up the supertype, and/or greater binding affinity for some or all of those HLA molecules Examples of analog peptides that exhibit modulated binding affinity are provided.

Analoging at Primary Anchor Residues

[0297] It has been shown that class I peptide ligands can be modified, or “fixed” to increase their binding affinity and/or degeneracy (Sidney et al., J. Immunol. 157:3480, 1996). These fixed peptides may also demonstrate increased immunogenicity and crossreactive recognition by T cells specific for the wild type epitope (Parkhurst et al., J. Immunol. 157:2539, 1996; Pogue et al., Proc. Natl. Acad. Sci. USA 92:8166, 1995). Specifically, the main anchors of A2 supertype peptides may be“fixed”, or analoged, to L or V (or M, if natural) at position 2, and V at the C-terminus. As indicated in Table XXVI, 9 of the 14 A2-supertype cross-reactive binding peptides are “fixable” by these criteria, as are 16 of the 21 non-cross-reactive binders. Ideal candidates for fixing would be peptides which bind at least 3 A2-supertype allele-specific molecules with IC₅₀≦5000 nM.

[0298] An example of the efficacy of this strategy to generate more broadly cross-reactive epitopes is provided by the case of peptide 1090.14 (Table XXVI). Previously, this peptide was shown to be highly immunogenic in each of the systems examined. However, it only exhibits binding to a single A2-supertype allele-specific molecule, A*0201. The non-crossreactive binding capacity of this epitope limits the population coverage and consequently the value of including this peptide in a candidate vaccine. In an effort to increase binding affinity and cross-reactivity the C-terminus of peptide 1090.14 was altered from ‘alanine’ to the A2-supermotif preferred residue ‘valine’. This change resulted in a dramatic (40-fold) increase in binding capacity for A*0201 (from 200 nM to 5.1 nM), but also produced a peptide capable of binding 3 other A2-supertype allele-specific molecules. (see peptide 1090.77, Table XXVI).

[0299] Studies with HLA-A*0201 transgenic mice have shown that the CTL response from mice immunized with the 1090.77 peptide recognize target cells loaded with either the naturally occurring peptide 1090.14 or the valine-substituted analog (i.e., 1090.77). In fact, the lysis effected by 1090.77 induced CTL was indistinguishable regardless whether the analog or the wild-type sequence was used to load the target cells (B. Livingston, unpublished data).

[0300] The relevance of these observations for the design of vaccine constructs is indicated by studies in which chronic HBV patients were treated with the potent viral replication inhibitor, lamivudine. Extended therapy with lamivudine resulted in the selection of drug-resistant strains of HBV that have a substitution of valine for methione at position 2 in the 1090.14 epitope, suggesting that epitope-based vaccines used in combination with lamivudine may need to have the ability to induce CTL responses that recognize both wild type and mutant sequences.

[0301] To demonstrate that cross-recognition is possible between the native peptide (1090.14), the analog peptide, and the lamivudine induced mutant M2 peptide, CTL were generated using the 1090.77 analog peptide. These CTL cultures were then stimulated with either the wild type peptide (1090.14), or the lamivudine induced mutant M2 peptide. The ability of these CTL to then lyse target cells loaded with either the wild type, or the lamivudine induced mutant peptide was then assayed. Target cells presenting either peptide were similarly lysed by either CTL culture (Table XXVI).

[0302] These studies demonstrate how analoging a peptide can result in dramatically increased HLA-A2 supertype degeneracy while still allowing cross-recognition between wildtype and mutant epitopes. More specifically, these results indicate that a vaccine utilizing the analog peptide 1090.77 should stimulate a response that will recognize both wild-type and lamivudine-resistant strains of HBV.

[0303] Similarly, analogs of HLA-A3 supermotif-bearing epitopes may also be generated. For example, peptides could be analogued to possess a preferred V at position 2, and R or K at the C-terminus. Twelve of the A3-supertype degenerate peptides identified in Table XXVII are candidates for main anchor fixing, as are 19 of the 24 non-cross-reactive binders.

[0304] Analog peptides are initially tested for binding to A*03 and A*11, and those that demonstrate equivalent, or improved, binding capacity relative to the parent peptide would then be tested for A3-supertype cross-reactivity. Analogs demonstrating improved cross-reactivity are then further evaluated for immunogenicity, as necessary.

[0305] Typically, it is more difficult to identify B7 supermotif-bearing epitopes. As in the cases of A2- and A3-supertype epitopes, a peptide analoguing strategy can be utilized to generate additional B7 supermotif-bearing epitopes with increased cross-reactive binding. In general, B7 supermotif-bearing peptides should be fixed to possess P in position 2, and I at their C-terminus.

[0306] Analogs representing primary anchor single amino acid residues substituted with I residues at the C-terminus of two different B7-like peptides (HBV env 313 and HBV pol 541) were synthesized and tested for their B7-supertype binding capacity. It was found that the I substitution had an overall positive effect on binding affinity and/or cross-reactivity in both cases. In the case of HBV env 313 the I9 (I at C-terminal position 9) replacement was effective in increasing cross-reactivity from 4 to 5 alleles bound by virtue of an almost 400-fold increase B*5401 binding affinity. In the case of HBV pol 541, increased cross-reactivity was similarly achieved by a substantial increase in B*5401 binding. Also, significant gains in binding affinity for B*0702, B51, and B*5301 were observed with the HBV pol 541 I9 analog.

Analoging at Secondary Anchor Residues

[0307] Moreover, HLA supermotifs are of value in engineering highly cross-reactive peptides by identifying particular residues at secondary anchor positions that are associated with such cross-reactive properties. Demonstrating this, the capacity of a second set of peptides representing discreet single amino acid substitutions at positions one and three of five different B7-supertype binding peptides were synthesized and tested for their B-7 supertype binding capacity. In 4/4 cases the effect of replacing the native residue at position 1 with the aromatic residue F (an “F1” substitution) resulted in an increase in cross-reactivity, compared to the parent peptide, and, in most instances, binding affinity was increased three-fold or better (Table XXVIII). More specifically, for HBV env 313, MAGE2 170, and HBV core 168 complete supertype cross-reactivity was achieved with the F1 substitution analogs. These gains were achieved by dramatically increasing B*5401 binding affinity. Also, gains in affinity were noted for other alleles in the cases of HBV core 168 (B*3501 and B*5301) and MAGE2 170 (B*3501, B51 and B*5301). Finally, in the case of MAGE3 196, the F1 replacement was effective in increasing cross-reactivity because of gains in B*0702 binding. An almost 70-fold increase in B51 binding capacity was also noted.

[0308] Two analogs were also made using the supernotif positive F substitution at position three (an “F3” substitution). In both instances increases in binding affinity and cross-reactivity were achieved. Specifically, in the case of HBV pol 541, the F3 substitution was effective in increasing cross-reactivity by virtue of its effect on B*5401 binding. In the case of MAGE3 196, complete supertype cross-reactivity was achieved by increasing B*0702 and B*3501 binding capacity. Also, in the case of MAGE3 196, it is notable that increases in binding capacity between 40- and 5000-fold were obtained for B*3501, B51, B*5301, and B*5401.

[0309] In conclusion, these data demonstrate that by the use of even single amino acid substitutions, it is possible to increase the binding affinity and/or cross-reactivity of peptide ligands for HLA supertype molecules.

### Example 5

### Identification of Conserved HBV-Derived Sequences with HLA-DR Binding Motifs

[0310] Peptide epitopes bearing an HLA class II supermotif or motif may also be identified as outlined below using methodology similar to that described in Examples 1-3.

Selection of HLA-DR-Supermotif-Bearing Epitopes

[0311] HLA-Class II molecules bind peptides typically between 12 and 20 residues in length. However, similar to HLA-Class I, the specificity and energy of interaction is usually contained within a short core region of about 9 residues. Most DR molecules share an overlapping specificity within this 9-mer core in which a hydrophobic residue in position 1 (P1) is the main anchor (O'Sullivan et al., J. Immunol. 147:2663, 1991; Southwood et al., J. Immunol. 160:3363, 1998). The presence of small or hydrophobic residues in position 6 (P6) is also important for most DR-peptide interactions. This overlapping P1-P6 specificity, within a 9-mer core region, has been defined as the DR-supermotif. Unlike Class I molecules, DR molecules are open at both ends of the binding groove, and can therefore accommodate longer peptides of varying length. Indeed, while most of the energy of peptide-DR interactions appears to be contributed by the core region, flanking residues appear to be important for high affinity interactions. Also, although not strictly necessary for MHC binding, flanking residues are clearly necessary in most instances for T cell recognition.

[0312] To identify HBV-derived DR cross-reactive HTL epitopes, the same 20 HBV polyproteins that were scanned for the identification of HLA Class I motif sequences were scanned for the presence of sequences with motifs for binding HLA-DR. Specifically, 15-mer sequences comprised of a DR-supermotif containing 9-mer core, and three residue N— and C-terminal flanking regions, were selected. It was also required that 100% of the 15-mer sequence be conserved in at least 85% (17/20) of the HBV strains scanned. Using these criteria, 36 non-redundant sequences were identified. Thirty-five of these peptides were subsequently synthesized.

[0313] Algorithms for predicting peptide binding to DR molecules have also been developed (Southwood et al., J. Immunol. 160:3363, 1998). These algorithms, specific for individual DR molecules, allow the scoring and ranking of 9-mer core regions. Using selection tables, it has been found that these algorithms efficiently select peptide sequences with a high probability of binding the appropriate DR molecule. Additionally, it has been found that running algorithms, specifically those for DR1, DR4w4, and DR7, sequentially can efficiently select DR cross-reactive peptides.

[0314] To see if these algorithms would identify additional peptides, the same HBV polyproteins used above were re-scanned for the presence of 15-mer peptides where 100% of the 9-mer core region was ³85% (17/20 strains) conserved. Next, the 9-mer core region of each of these peptides was scored using the DR1, DR4w4, and DR7 algorithms. As a result, 8 additional sequences were identified and synthesized.

[0315] In summary, 44 15-mer peptides in which a 9-mer core region contained the DRsupermotif, or was selected using an algorithm predicting DR-binding sequences, were identified. Forty-three of these peptides were synthesized (Table XXXII).

[0316] While performing the analyses of HBV-derived peptides described above, 9 peptides predicted on the basis of their DR1, DR4w4, and DR7 algorithm profiles to be DR-cross-reactive binding peptides, but which have 9-mer core regions that are only 80% conserved, were also identified. An additional peptide which contains a DR-supermotif core region that is 95% conserved, but is located only one residue removed from the N-terminus, was previously synthesized. These 10 peptides were also selected for further analysis, and are shown in Table XXXIII.

[0317] Finally, 2 peptides, CF-08 and 1186.25, which are redundant with a peptide selected above (27.0280), were considered for additional analysis. Peptide 1186.25 contains multiple DR-supermotif sequences. Peptide CF-08 is a 20-mer that nests both 27.0280 and 1186.25. These peptides are shown in Table XXXIII.

[0318] The 55 HBV-derived peptides identified above were tested for their capacity to bind common HLA-DR alleles. To maximize both population coverage, and the relationships between the binding repertoires of most DR alleles (see, e.g., Southwood et al., J. Immunol. 160:3363, 1998), peptides were screened for binding to sequential panels of DR assays. The composition of these screening panels, and the phenotypic frequency of associated antigens, are shown in Table XXXIV. All peptides were initially tested for binding to the alleles in the primary panel: DR1, DR4w4, and DR7. Only peptides binding at least 2 of these 3 alleles were then tested for binding in the secondary assays (DR2w2 β1, DR2w2 β2, DR6w19, and DR9). Finally, only peptides binding at least 2 of the 4 secondary panel alleles, and thus 4 of 7 alleles total, were screened for binding in the tertiary assays (DR4w15, DR5w11, and DR8w2).

[0319] Upon testing, it was found that 25 of the original 55 peptides (45%) bound two or more of the primary panel alleles. When these 25 peptides were subsequently tested in the secondary assays, 20 were found to bind at least 4 of the 7 DR alleles in the primary and secondary assay panels. Finally, 18 of the 20 peptides passing the secondary screening phase were tested for binding in the tertiary assays. As a result, 12 peptides were shown to bind at least 7 of 10 common HLA-DR alleles. The sequences of these 12 peptides, and their binding capacity for each assay in the primary through tertiary panels, are shown in Table XXXV. Also shown are peptides CF-08 and 857.02, which bound 5/5 and 5/6 of the alleles tested to date, respectively.

[0320] In summary, 14 peptides, derived from 12 independent regions of the HBV genome, have been identified that are capable of binding multiple HLA-DR alleles. This set of peptides includes at least 2 epitopes each from the Core (Nuc), Pol, and Env antigens.

Selection of Conserved DR3 Motif Peptides

[0321] Because HLA-DR3 is an allele that is prevalent in Caucasian, Black, and Hispanic populations, DR3 binding capacity is an important criterion in the selection of HTL epitopes. However, data generated previously indicated that DR3 only rarely cross-reacts with other DR alleles (Sidney et al., J. Immunol. 149:2634-2640, 1992; Geluk et al., J. Immunol. 152:5742-5748, 1994; Southwood et al., J. Immunol. 160:3363-3373, 1998). This is not entirely surprising in that the DR3 peptide-binding motif appears to be distinct from the specificity of most other DR alleles.

[0322] To efficiently identify peptides that bind DR3, target proteins were analyzed for conserved sequences carrying one of the two DR3 specific binding motifs reported by Geluk et al. (J. Immunol. 152:5742-5748, 1994). Eighteen sequences were identified. Eight of these sequences were largely redundant with peptides shown in Table XXXVI, and 3 with peptides that had previously been synthesized for other studies. The 7 unique sequences were synthesized.

[0323] Seventeen of the eighteen peptides containing a DR3 motif have been tested for their DR3 binding capacity. Four peptides were found to bind DR3 with an affinity of 1000 nM or better (Table XXXVI).

### Example 6

### Immunogenicity of HPV-Derived HTL Epitopes

[0324] This example determines immunogenic DR supermotif- and DR3 motif-bearing epitopes among those identified using the methodology in Example 5.

[0325] Immunogenicity of HTL epitopes are evaluated in a manner analogous to the determination of immunogenicity of CTL epitopes by assessing the ability to stimulate HTL responses and/or by using appropriate transgenic mouse models. Immunogenicity is determined by screening for: 1.) in vitro primary induction using normal PBMC or 2.) recall responses from cancer patient PBMCs.

### Example 7

### Calculation of Phenotypic Frequencies of HLA-Supertypes in Various Ethnic Backgrounds to Determine Breadth of Population Coverage

[0326] This example illustrates the assessment of the breadth of population coverage of a vaccine composition comprised of multiple epitopes comprising multiple supermotifs and/or motifs.

[0327] In order to analyze population coverage, gene frequencies of HLA alleles were determined. Gene frequencies for each HLA allele were calculated from antigen or allele frequencies utilizing the binomial distribution formulae gf=1−(SQRT(1−af)) (see, e.g., Sidney et al., Human Immunol. 45:79-93, 1996). To obtain overall phenotypic frequencies, cumulative gene frequencies were calculated, and the cumulative antigen frequencies derived by the use of the inverse formula [af=1−(1−Cgf)2].

[0328] Where frequency data was not available at the level of DNA typing, correspondence to the serologically defined antigen frequencies was assumed. To obtain total potential supertype population coverage no linkage disequilibrium was assumed, and only alleles confirmed to belong to each of the supertypes were included (minimal estimates). Estimates of total potential coverage achieved by inter-loci combinations were made by adding to the A coverage the proportion of the non-A covered population that could be expected to be covered by the B alleles considered (e.g., total=A+B*(1−A)). Confirmed members of the A3-like supertype are A3, A11, A31, A*3301, and A*6801. Although the A3-like supertype may potentially include A34, A66, and A*7401, these alleles were not included in overall frequency calculations. Likewise, confirmed members of the A2-like supertype family are A*0201, A*0202, A*0203, A*0204, A*0205, A*0206, A*0207, A*6802, and A*6901. Finally, the B7-like supertype-confirmed alleles are: B7, B*3501-03, B51, B*5301, B*5401, B*5501-2, B*5601, B*6701, and B*7801 (potentially also B*1401, B*3504-06, B*4201, and B*5602).

[0329] Population coverage achieved by combining the A2-, A3- and B7-supertypes is approximately 86% in five major ethnic groups (see Table XXI). Coverage may be extended by including peptides bearing the A1 and A24 motifs. On average, A1 is present in 12% and A24 in 29% of the population across five different major ethnic groups (Caucasian, North American Black, Chinese, Japanese, and Hispanic). Together, these alleles are represented with an average frequency of 39% in these same ethnic populations. The total coverage across the major ethnicities when A1 and A24 are combined with the coverage of the A2-, A3- and B7-supertype alleles is >95%.

[0330] Population coverage for HLA class II molecules can be developed analagously based on the present disclosure.

Summary of Candidate HLA Class I and Class II Epitopes

[0331] In summary, on the basis of the data presented above, 34 conserved CTL epitopes were selected as vaccine candidates (Table XXXVII). Of these 34 epitopes, 7 are derived from core, 18 from polymerase, and 9 from envelope. No epitopes from the X antigen were included in the package as this protein is expressed in low amounts and is, therefore, of less immunological interest.

[0332] The population coverage afforded by this panel of CTL epitopes is estimated to exceed 95% in each of 5 major ethnic populations. Using a Monte Carlo analysis (FIG. 1), it is predicted that approximately 90% of the individuals in a population comprised of Caucasians, North American Blacks, Japanese, Chinese and Hispanics would recognize five or more of the vaccine candidate epitopes.

[0333] While preferred CTL epitopes includes 34 discrete peptides, two peptides are entirely nested within longer peptides, thus effectively reducing the numbers of peptides that would have to be included in a vaccine candidate. Specifically, the A2-restricted peptide 927.15 is nested within the B7-restricted peptide 26.0570 and the B7-restricted peptide 988.05 is nested within the A2-restricted peptide 924.07. Similarly, the A24-restricted peptide 20.0136 and the A2-restricted peptide 1013.01 contain the same core region, differing only at the first amino acid. On a related note, the A2-restricted peptide 1090.14 and the B7-restricted peptide 1147.05 overlap by two amino acids, raising the possibility of delivering these two epitopes as one contiguous peptide sequence.

[0334] The set of peptides includes 9 A2-restricted CTL epitopes; four polymerase-derived epitopes, four envelope-derived epitopes and a core epitope. Seven of these 9 peptides are recognized in recall CTL assays from acute patients. Of the 7 peptides recognized in patients, 2 are non-crossreactive binding peptides. The inclusion of these peptides as potential vaccine candidates stems from the observation that HLA-A*0201 is the predominantly expressed A2-supertype allele in all ethnicities examined. As such, inclusion of non-crossreactive A*0201 binding peptides increases the redundancy of antigen coverage and population coverage. The only two A2-restricted peptides that lack patient immunogenicity data are peptides 1090.77 and 1069.06. The 1090.77 peptide is an analog of a highly immunogenic peptide recognized in acute HBV patients. Although recall responses in patients have not been tested for the ability to recognize the analog peptide, immunogenicity studies conducted in HLA transgenic mice have shown that CTL induced with 1090.77 are capable of recognizing target cells loaded with the naturally occurring sequence. These data indicate that CTL raised to the 1090.77 peptide are cross-reactive and should recognize HBV-infected cells. The 1069.06 peptide was included as a potential vaccine epitope because its high binding affinity for A*6802 results in a greater population coverage. The peptide is immunogenic in HLA-A2 transgenic mice and primary human cultures.

[0335] Preferred CTL epitopes include 7 A3-supertype-resticted peptides; 6 derived from the polymerase antigen, and one from the core region. All of the A3-supertype vaccine candidate peptides are immunogenic in patients. Although peptide 1142.05 is a non-crossreactive A3-restricted peptide, it has been shown to be recognized in patients and is capable of binding HLA-A1.

[0336] Nine B7-restricted peptides are preferred CTL epitopes identified in the examples. Of this group, 3 epitopes have been shown to be recognized in patients. While one of these peptides, 1147.04, is a non-crossreactive binder, it binds 2 of the major B7 supertype alleles with an IC₅₀ or binding affinity value of less than 100 nM. Six B7-supertype epitopes were included as preferred epitopes based on supertype binding. Immunogenicity studies in humans (Bertoni et al., 1997; Doolan et al., 1997; Threlkeld et al., 1997) have demonstrated that highly cross-reactive peptides are almost always recognized as epitopes. Given these results, and in light of the limited immunogenicity data available, the use of B7-supertype binding affinity as a selection criterion was deemed appropriate.

[0337] Similarly, there is little immunogenicity data regarding A1- and A24-restricted peptides. One preferred CTL epitope, 1069.04, has been reported to be recognized in recall responses from acute HBV patients. As discussed in the preceding paragraph, a high percentage of the peptides with binding affinities <100 nM are found to be immunogenic. For this reason, all A1 and A24 peptides with binding affinities <100 nM were considered as preferred CTL epitopes. Using this selection criterion, 3 A1-restricted and 6 A24-restricted peptides are identified as candidate epitopes. Further analysis found that 3 core-derived peptides bound A24 with intermediate affinity. Since relatively few core epitopes were identified during the course of this study, the intermediate A24 binding core peptides were also included in the set of preferred epitopes to provide a greater degree of redundancy in antigen coverage.

[0338] The list of preferred HBV-derived HTL epitopes is summarized in Table XXXVII. The set of HTL epitopes includes 12 DR supermotif binding peptides and 4 DR3 binding peptides. The bulk of the HTL epitopes are derived from polymerase; 2 envelope and 2 core derived epitopes are also included in the set of preferred HTL epitopes. The total estimated population coverage represented by the panel of HTL epitopes is in excess of 91% in each of five major ethnic groups (Table XXXVIII).

### Example 9

### Recognition of Generation of Endogenous Processed Antigens after Priming

[0339] This example determines that CTL induced by native or analoged epitopes identified and selected as described in Examples 1-5 recognize endogenously synthesized, i.e., native antigens.

[0340] Effector cells isolated from transgenic mice immunized with peptide epitopes as in Example 3, for example, HLA-A2 supermotif-bearing epitopes, are re-stimulated in vitro using peptide-coated stimulator cells. Six days later, effector cells are assayed for cytotoxicity and the cell lines that contain peptide-specific cytotoxic activity are further re-stimulated. An additional six days later, these cell lines are tested for cytotoxic activity on ⁵¹Cr labeled Jurkat-A2.1/Kb target cells, in the absence or presence of peptide, and also tested on ⁵¹Cr labeled target cells bearing the endogenously synthesized antigen, e.g., cells that are stably transfected with HBV expression vectors.

[0341] The results show that CTL lines obtained from animals primed with peptide epitope recognize endogenously synthesized HBV antigen. The choice of transgenic mouse model to be used for such an analysis depends upon the epitope(s) that is being evaluated. In addition to HLA-A*0201/Kb transgenic mice, several other transgenic mouse models including mice with human A11, which may also be used to evaluate A3 epitopes, and B7 alleles have been characterized and others (e.g., transgenic mice for HLA-A1 and A24) are being developed. HLA-DR1 and HLA-DR3 mouse models have also been developed, which may be used to evaluate HTL epitopes.

### Example 9

### Activity of CTL-HTL Conjugated Epitopes in Transgenic Mice

[0342] This example illustrates the induction of CTLs and HTLs in transgenic mice by use of an HBV CTL/HTL peptide conjugate. An analogous study may be found in Oseroff et al. Vaccine 16:823-833 (1998).

[0343] The peptide composition can comprise multiple CTL and/or HTL epitopes and further, can comprise epitopes selected from multiple HPV target antigens. The epitopes are identified using methodology as described in Examples 1-6. For example, such a peptide composition can comprise an HTL epitope conjugated to a preferred CTL epitope containing, for example, at least one CTL epitope that binds to multiple HLA family members at an affinity of 500 nM or less, or analogs of that epitope. The peptides may be lipidated, if desired.

[0344] Immunization procedures: Immunization of transgenic mice is performed as described (Alexander et al., J. Immunol. 159:4753-4761, 1997). For example, A2/Kb mice, which are transgenic for the human HLA A2.1 allele and are useful for the assessment of the immunogenicity of HLA-A*0201 motif- or HLA-A2 supermotif-bearing epitopes, are primed subcutaneously (base of the tail) with a 0.1 ml of peptide in Incomplete Freund's Adjuvant, or if the peptide composition is a lipidated CTL/HTL conjugate, in DMSO/saline or if the peptide composition is a polypeptide, in PBS or Incomplete Freund's Adjuvant. Seven days after priming, splenocytes obtained from these animals are restimulated with syngenic irradiated LPS-activated lymphoblasts coated with peptide.

[0345] Cell lines: Target cells for peptide-specific cytotoxicity assays are Jurkat cells transfected with the HLA-A2.1/Kb chimeric gene (e.g., Vitiello et al., J. Exp. Med. 173:1007, 1991)

[0346] In vitro CTL activation: One week after priming, spleen cells (30×10⁶ cells/flask) are co-cultured at 37° C. with syngeneic, irradiated (3000 rads), peptide coated lymphoblasts (10×10⁶ cells/flask) in 10 ml of culture medium/T25 flask. After six days, effector cells are harvested and assayed for cytotoxic activity.

[0347] Assay for cytotoxic activity: Target cells (1.0 to 1.5×10⁶) are incubated at 37° C. in the presence of 200 μl of ⁵¹Cr. After 60 minutes, cells are washed three times and resuspended in R10 medium. Peptide is added where required at a concentration of 1 μg/ml. For the assay, 10^{4 51}Cr-labeled target cells are added to different concentrations of effector cells (final volume of 200 μl) in U-bottom 96-well plates. After a 6 hour incubation period at 37° C., a 0.1 ml aliquot of supernatant is removed from each well and radioactivity is determined in a Micromedic automatic gamma counter. The percent specific lysis is determined by the formula: percent specific release=100×(experimental release−spontaneous release)/(maximum release−spontaneous release). To facilitate comparison between separate CTL assays run under the same conditions, % ⁵¹Cr release data is expressed as lytic units/10⁶ cells. One lytic unit is arbitrarily defined as the number of effector cells required to achieve 30% lysis of 10,000 target cells in a 6 hour 51Cr release assay. To obtain specific lytic units/10⁶, the lytic units/10⁶ obtained in the absence of peptide is subtracted from the lytic units/10⁶ obtained in the presence of peptide. For example, if 30% ⁵¹Cr release is obtained at the effector (E): target (T) ratio of 50:1 (i.e., 5×10⁵ effector cells for 10,000 targets) in the absence of peptide and 5:1 (i.e., 5×10⁴ effector cells for 10,000 targets) in the presence of peptide, the specific lytic units would be: [( 1/50,000)−( 1/500,000)]×10⁶=18 LU.

[0348] The results are analyzed to assess the magnitude of the CTL responses of animals injected with the immunogenic CTL/HTL conjugate vaccine preparation and are compared to the magnitude of the CTL response achieved using the CTL epitope as outlined in Example 3. Analyses similar to this may be performed to evaluate the immunogenicity of peptide conjugates containing multiple CTL epitopes and/or multiple HTL epitopes. In accordance with these procedures it is found that a CTL response is induced, and concomitantly that an HTL response is induced upon administration of such compositions.

### Example 10

### Selection of CTL and HTL Epitopes for Inclusion in an HBV-Specific Vaccine

[0349] This example illustrates the procedure for the selection of peptide epitopes for vaccine compositions of the invention. The peptides in the composition can be in the form of a nucleic acid sequence, either single or one or more sequences (i.e., minigene) that encodes peptide(s), or can be single and/or polyepitopic peptides.

[0350] The following principles are utilized when selecting an array of epitopes for inclusion in a vaccine composition. Each of the following principles is balanced in order to make the selection.

[0351] Epitopes are selected which, upon administration, mimic immune responses that have been observed to be correlated with HBV clearance. The number of epitopes used depends on observations of patients who spontaneously clear HBV. For example, if it has been observed that patients who spontaneously clear HBV generate an immune response to at least 3 epitopes on at least one HPB antigen, then 3-4 epitopes should be included for HLA class I. A similar rationale is used to determine HLA class II epitopes.

[0352] Epitopes are often selected that have a binding affinity of an IC₅₀ of 500 nM or less for an HLA class I molecule, or for class II, an IC₅₀ of 1000 nM or less.

[0353] Sufficient supermotif bearing peptides, or a sufficient array of allele-specific motif bearing peptides, are selected to give broad population coverage. For example, epitopes are selected to provide at least 80% population coverage. A Monte Carlo analysis, a statistical evaluation known in the art, can be employed to assess breadth, or redundancy, of population coverage.

[0354] When creating a polyepitopic compositions, e.g. a minigene, it is typically desirable to generate the smallest peptide possible that encompasses the epitopes of interest. The principles employed are similar, if not the same, as those employed when selecting a peptide comprising nested epitopes.

[0355] In cases where the sequences of multiple variants of the same target protein are available, potential peptide epitopes can also be selected on the basis of their conservancy. For example, a criterion for conservancy may define that the entire sequence of an HLA class I binding peptide or the entire 9-mer core of a class 1L binding peptide be conserved in a designated percentage of the sequences evaluated for a specific protein antigen.

[0356] Epitopes for inclusion in vaccine compositions are, for example, selected from those listed in Table XXXVIIa and b. A vaccine composition comprised of selected peptides, when administered, is safe, efficacious, and elicits an immune response similar in magnitude of an immune response that clears an acute HBV infection.

### Example 11

### Construction of Minigene Multi-Epitope DNA Plasmids

[0357] This example provides guidance for construction of a minigene expression plasmid. Minigene plasmids can, of course, contain various configurations of CTL and/or HTL epitopes or epitope analogs as described herein. Examples of the construction and evaluation of expression plasmids are described, for example, in co-pending U.S. Ser. No. 09/311,784 filed May 13, 1999. An example of such a plasmid is shown in FIG. 2, which illustrates the orientation of HBV epitopes in minigene constructs. Such a plasmid can, for example, also include multiple CTL and HTL peptide epitopes.

[0358] A minigene expression plasmid typically includes multiple CTL and HTL peptide epitopes. In the present example, HLA-A2, -A3, -B7 supermotif-bearing peptide epitopes and HLA-A1 and -A24 motif-bearing peptide epitopes are used in conjunction with DR supermotif-bearing epitopes and/or DR3 epitopes (FIG. 2). Preferred epitopes are identified, for example, in Tables XXVI-XXXIII, HLA class I supermotif or motif-bearing peptide epitopes derived from multiple HBV antigens, e.g., the core, polymerase, envelope and X proteins, are selected such that multiple supermotifs/motifs are represented to ensure broad population coverage. Similarly, HLA class II epitopes are selected from multiple HBV antigens to provide broad population coverage, i.e. both HLA DR-1-4-7 supermotif-bearing epitopes and HLA DR-3 motif-bearing epitopes are selected for inclusion in the minigene construct. The selected CTL and HTL epitopes are then incorporated into a minigene for expression in an expression vector.

[0359] This example illustrates the methods to be used for construction of such a minigene-bearing expression plasmid. Other expression vectors that may be used for minigene compositions are available and known to those of skill in the art.

[0360] The minigene DNA plasmid contains a consensus Kozak sequence and a consensus murine kappa Ig-light chain signal sequence followed by a string of CTL and/or HTL epitopes selected in accordance with principles disclosed herein.

[0361] Overlapping oligonucleotides, for example eight oligonucleotides, averaging approximately 70 nucleotides in length with 15 nucleotide overlaps, are synthesized and HPLC-purified. The oligonucleotides encode the selected peptide epitopes as well as appropriate linker nucleotides. The final multiepitope minigene is assembled by extending the overlapping oligonucleotides in three sets of reactions using PCR. A Perkin/Elmer 9600 PCR machine is used and a total of 30 cycles are performed using the following conditions: 95° C. for 15 sec, annealing temperature (50 below the lowest calculated Tm of each primer pair) for 30 sec, and 72° C. for 1 min.

[0362] For the first PCR reaction, 5 μg of each of two oligonucleotides are annealed and extended: Oligonucleotides 1+2, 3+4, 5+6, and 7+8 are combined in 100 μl reactions containing Pfu polymerase buffer (1×=10 mM KCL, 10 mM (NH4)2SO4, 20 mM Tris-chloride, pH 8.75, 2 mM MgSO4, 0.1% Triton X-100, 100 μg/ml BSA), 0.25 mM each dNTP, and 2.5 U of Pfu polymerase. The full-length dimer products are gel-purified, and two reactions containing the product of 1+2 and 3+4, and the product of 5+6 and 7+8 are mixed, annealed, and extended for 10 cycles. Half of the two reactions are then mixed, and 5 cycles of annealing and extension carried out before flanking primers are added to amplify the full length product for 25 additional cycles. The full-length product is gel-purified and cloned into pCR-blunt (Invitrogen) and individual clones are screened by sequencing.

### Example 12

### The Plasmid Construct and the Degree to which it Induces Immunogenicity

[0363] The degree to which a plasmid construct, for example a plasmid constructed in accordance with Example 11, is able to induce immunogenicity can be evaluated in vitro by testing for epitope presentation by APC following transduction or transfection of the APC with an epitope-expressing nucleic acid construct. Such a study determines “antigenicity” and allows the use of human APC. The assay determines the ability of the epitope to be presented by the APC in a context that is recognized by a T cell by quantifying the density of epitope-HLA class I complexes on the cell surface. Quantitation can be performed by directly measuring the amount of peptide eluted from the APC (see, e.g., Sijts et al., J. Immunol. 156:683-692, 1996; Demotz et al., Nature 342:682-684, 1989); or the number of peptide-HLA class I complexes can be estimated by measuring the amount of lysis or lymphokine release induced by infected or transfected target cells, and then determining the concentration of peptide necessary to obtained equivalent levels of lysis or lymphokine release (see, e.g., Kageyama et al., J. Immunol. 154:567-576, 1995).

[0364] Atlernatively, immunogenicity can be evaluated through in vivo injections into mice and subsequent in vitro assessment of CTL and HTL activity, which are analysed using cytotoxicity and proliferation assays, respectively, as detailed e.g., in copending U.S. Ser. No. 09/311,784 filed May 13, 1999 and Alexander et al., Immunity 1:751-761, 1994.

[0365] For example, to assess the capacity of a DNA minigene construct (e.g., a pMin minigene construct generated as decribed in U.S. Ser. No. 09/311,784) containing at least one HLA-A2 supermotif peptide to induce CTLs in vivo, HLA-A2.1/Kb transgenic mice, for example, are immunized intramuscularly with 100 μg of naked cDNA. As a means of comparing the level of CTLs induced by cDNA immunization, a control group of animals is also immunized with an actual peptide composition that comprises multiple epitopes synthesized as a single polypeptide as they would be encoded by the minigene.

[0366] Splenocytes from immunized animals are stimulated twice with each of the respective compositions (peptide epitopes encoded in the minigene or the polyepitopic peptide), then assayed for peptide-specific cytotoxic activity in a ⁵¹Cr release assay. The results indicate the magnitude of the CTL response directed against the A2-restricted epitope, thus indicating the in vivo immunogenicity of the minigene vaccine and polyepitopic vaccine. It is, therefore, found that the minigene elicits immune responses directed toward the HLA-A2 supermotif peptide epitopes as does the polyepitopic peptide vaccine. A similar analysis is also performed using other HLA-A3 and HLA-B7 transgenic mouse models to assess CTL induction by HLA-A3 and HLA-B7 motif or supermotif epitopes.

[0367] To assess the capacity of a class II epitope encoding minigene to induce HTLs in vivo, DR transgenic mice, or for those epitope that cross react with the appropriate mouse MHC molecule, I-Ab-restricted mice, for example, are immunized intramuscularly with 100 μg of plasmid DNA. As a means of comparing the level of HTLs induced by DNA immunization, a group of control animals is also immunized with an actual peptide composition emulsified in complete Freund's adjuvant. CD4⁺ T cells, i.e. HTLs, are purified from splenocytes of immunized animals and stimulated with each of the respective compositions (peptides encoded in the minigene). The HTL response is measured using a 3H-thymidine incorporation proliferation assay, (see, e.g., Alexander et al. Immunity 1:751-761, 1994). The results indicate the magnitude of the HTL response, thus demonstrating the in vivo immunogenicity of the minigene.

[0368] DNA minigenes, constructed as described in Example 11, may also be evaluated as a vaccine in combination with a boosting agent using a prime boost protocol. The boosting agent can consist of recombinant protein (e.g., Barnett et al., Aids Res. and Human Retroviruses 14, Supplement 3:S299-S309, 1998) or recombinant vaccinia, for example, expressing a minigene or DNA encoding the complete protein of interest (see, e.g., Hanke et al., Vaccine 16:439-445, 1998; Sedegah et al., Proc. Natl. Acad. Sci USA 95:7648-53, 1998; Hanke and McMichael, Immunol. Letters 66:177-181, 1999; and Robinson et al., Nature Med. 5:526-34, 1999).

[0369] For example, the efficacy of the DNA minigene used in a prime boost protocol is initially evaluated in transgenic mice. In this example, A2.1/Kb transgenic mice are immunized IM with 100 μg of a DNA minigene encoding the immunogenic peptides including at least one HLA-A2 supermotif-bearing peptide. After an incubation period (ranging from 3-9 weeks), the mice are boosted IP with 10⁷ pfu/mouse of a recombinant vaccinia virus expressing the same sequence encoded by the DNA minigene. Control mice are immunized with 100 μg of DNA or recombinant vaccinia without the minigene sequence, or with DNA encoding the minigene, but without the vaccinia boost. After an additional incubation period of two weeks, splenocytes from the mice are immediately assayed for peptide-specific activity in an ELISPOT assay. Additionally, splenocytes are stimulated in vitro with the A2-restricted peptide epitopes encoded in the minigene and recombinant vaccinia, then assayed for peptide-specific activity in an IFN-γ ELISA.

[0370] It is found that the minigene utilized in a prime-boost protocol elicits greater immune responses toward the HLA-A2 supermotif peptides than with DNA alone. Such an analysis can also be performed using HLA-A11 or HLA-B7 transgenic mouse models to assess CTL induction by HLA-A3 or HLA-B7 motif or supermotif epitopes.

[0371] The use of prime boost protocols in humans is described in Example 20.

### Example 13

### Peptide Composition for Prophylactic Uses

[0372] Vaccine compositions of the present invention can be used to prevent HJBV infection in persons who are at risk for such infection. For example, a polyepitopic peptide epitope composition (or a nucleic acid comprising the same) containing multiple CTL and HTL epitopes such as those selected in Examples 9 and/or 10, which are also selected to target greater than 80% of the population, is administered to individuals at risk for HBV infection.

[0373] For example, a peptide-based composition can be provided as a single polypeptide that encompasses multiple epitopes. The vaccine is typically administered in a physiological solution that comprises an adjuvant, such as Incomplete Freunds Adjuvant. The dose of peptide for the initial immunization is from about 1 to about 50,000 μg, generally 100-5,000 μg, for a 70 kg patient. The initial administration of vaccine is followed by booster dosages at 4 weeks followed by evaluation of the magnitude of the immune response in the patient, by techniques that determine the presence of epitope-specific CTL populations in a PBMC sample. Additional booster doses are administered as required. The composition is found to be both safe and efficacious as a prophylaxis against HPV infection.

[0374] Alternatively, a composition typically comprising transfecting agents can be used for the administration of a nucleic acid-based vaccine in accordance with methodologies known in the art and disclosed herein.

### Example 14

### Polyepitopic Vaccine Compositions Derived from Native HBV Sequences

[0375] A native HBV polyprotein sequence is screened, preferably using computer algorithms defined for each class I and/or class II supermotif or motif, to identify “relatively short” regions of the polyprotein that comprise multiple epitopes and is preferably less in length than an entire native antigen. This relatively short sequence that contains multiple distinct, even overlapping, epitopes is selected and used to generate a minigene construct. The construct is engineered to express the peptide, which corresponds to the native protein sequence. The “relatively short” peptide is generally less than 250 amino acids in length, often less than 100 amino acids in length, preferably less than 75 amino acids in length, and more preferably less than 50 amino acids in length. The protein sequence of the vaccine composition is selected because it has maximal number of epitopes contained within the sequence, i.e., it has a high concentration of epitopes. As noted herein, epitope motifs may be nested or overlapping (i.e., frame shifted relative to one another). For example, with f overlapping epitopes, two 9-mer epitopes and one 10-mer epitope can be present in a 10 amino acid peptide. Such a vaccine composition is administered for therapeutic or prophylactic purposes.

[0376] The vaccine composition will include, for example, three CTL epitopes from at least one HBV target antigen and at least one HTL epitope. This polyepitopic native sequence is administered either as a peptide or as a nucleic acid sequence which encodes the peptide. Alternatively, an analog can be made of this native sequence, whereby one or more of the epitopes comprise substitutions that alter the cross-reactivity and/or binding affinity properties of the polyepitopic peptide.

[0377] The embodiment of this example provides for the possibility that an as yet undiscovered aspect of immune system processing will apply to the native nested sequence and thereby facilitate the production of therapeutic or prophylactic immune response-inducing vaccine compositions. Additionally such an embodiment provides for the possibility of motif-bearing epitopes for an HLA makeup that is presently unknown. Furthermore, this embodiment (absent analogs) directs the immune response to multiple peptide sequences that are actually present in native HBV antigens thus avoiding the need to evaluate any junctional epitopes. Lastly, the embodiment provides an economy of scale when producing nucleic acid vaccine compositions.

[0378] Related to this embodiment, computer programs can be derived in accordance with principles in the art, which identify in a target sequence, the greatest number of epitopes per sequence length.

### Example 15

### Polyepitopic Vaccine Compositions Directed to Multiple Diseases

[0379] The HBV peptide epitopes of the present invention are used in conjunction with peptide epitopes from target antigens related to one or more other diseases, to create a vaccine composition that is useful for the prevention or treatment of HBV as well as another disease. Examples of other diseases include, but are not limited to, HIV, HCV, and HPV.

[0380] For example, a polyepitopic peptide composition comprising multiple CTL and HTL epitopes that target greater than 98% of the population may be created for administration to individuals at risk for both HBV and HIV infection. The composition can be provided as a single polypeptide that incorporates the multiple epitopes from the various disease-associated sources, or can be administered as a composition comprising one or more discrete epitopes.

### Example 16

### Use of Peptides to Evaluate an Immune Response

[0381] Peptides of the invention may be used to analyze an immune response for the presence of specific CTL or HTL populations directed to HBV. Such an analysis may be performed in a manner as that described by Ogg et al., Science 279:2103-2106, 1998. In the following example, peptides in accordance with the invention are used as a reagent for diagnostic or prognostic purposes, not as an immunogen.

[0382] In this example highly sensitive human leukocyte antigen tetrameric complexes (“tetramers”) are used for a cross-sectional analysis of, for example, HBV HLA-A*0201-specific CTL frequencies from HLA A*0201-positive individuals at different stages of infection or following immunization using an HBV peptide containing an A*0201 motif. Tetrameric complexes are synthesized as described (Musey et al., N. Engl. J. Med. 337:1267, 1997). Briefly, purified HLA heavy chain (A*0201 in this example) and P2-microglobulin are synthesized by means of a prokaryotic expression system. The heavy chain is modified by deletion of the transmembrane-cytosolic tail and COOH-terminal addition of a sequence containing a BirA enzymatic biotinylation site. The heavy chain, β2-microglobulin, and peptide are refolded by dilution. The 45-kD refolded product is isolated by fast protein liquid chromatography and then biotinylated by BirA in the presence of biotin (Sigma, St. Louis, Mo.), adenosine 5′triphosphate and magnesium. Streptavidin-phycoerythrin conjugate is added in a 1:4 molar ratio, and the tetrameric product is concentrated to 1 mg/ml. The resulting product is referred to as tetramer-phycoerythrin.

[0383] For the analysis of patient blood samples, approximately one million PBMCs are centrifuged at 300 g for 5 minutes and resuspended in 50 μl of cold phosphate-buffered saline. Tri-color analysis is performed with the tetramer-phycoerythrin, along with anti-CD8-Tricolor, and anti-CD38. The PBMCs are incubated with tetramer and antibodies on ice for 30 to 60 min and then washed twice before formaldehyde fixation. Gates are applied to contain >99.98% of control samples. Controls for the tetramers include both A*0201-negative individuals and A*0201-positive uninfected donors. The percentage of cells stained with the tetramer is then determined by flow cytometry. The results indicate the number of cells in the. PBMC sample that contain epitope-restricted CTLs, thereby readily indicating the extent of immune response to the HBV epitope, and thus the stage of infection with HBV, the status of exposure to HBV, or exposure to a vaccine that elicits a protective or therapeutic response.

### Example 17

### Use of Peptide Epitopes to Evaluate Recall Responses

[0384] The peptide epitopes of the invention are used as reagents to evaluate T cell responses, such as acute or recall responses, in patients. Such an analysis may be performed on patients who have recovered from infection, who are chronically infected with HBV, or who have been vaccinated with an HBV vaccine.

[0385] For example, the class I restricted CTL response of persons who have been vaccinated may be analyzed. The vaccine may be any HBV vaccine. PBMC are collected from vaccinated individuals and HLA-typed. Appropriate peptide epitopes of the invention that, optimally, bear supermotifs to provide cross-reactivity with multiple HLA supertype family members, are then used for analysis of samples derived from individuals who bear that HLA type.

[0386] PBMC from vaccinated individuals are separated on Ficoll-Histopaque density gradients (Sigma Chemical Co., St. Louis, Mo.), washed three times in HBSS (GIBCO Laboratories), resuspended in RPMI-1640 (GIBCO Laboratories) supplemented with L-glutamine (2 mM), penicillin (50 U/ml), streptomycin (50 μg/ml), and Hepes (10 mM) containing 10% heat-inactivated human AB serum (complete RPMI) and plated using microculture formats. A synthetic peptide comprising an epitope of the invention is added at 10 μg/ml to each well and HBV core 128-140 epitope is added at 1 μg/ml to each well as a source of T cell help during the first week of stimulation.

[0387] In the microculture format, 4×10⁵ PBMC are stimulated with peptide in 8 replicate cultures in 96-well round bottom plate in 100 μl/well of complete RPMI. On days 3 and 10, 100 ml of complete RPMI and 20 U/ml final concentration of rIL-2 are added to each well. On day 7 the cultures are transferred into a 96-well flat-bottom plate and restimulated with peptide, rIL-2 and 10⁵ irradiated (3,000 rad) autologous feeder cells. The cultures are tested for cytotoxic activity on day 14. A positive CTL response requires two or more of the eight replicate cultures to display greater than 10% specific ⁵¹Cr release, based on comparison with uninfected control subjects as previously described (Rehermann, et al., Nature Med. 2:1104,1108, 1996; Rehermann et al., J. Clin. Invest. 97:1655-1665, 1996; and Rehermann et al. J. Clin. Invest. 98:1432-1440, 1996).

[0388] Target cell lines are autologous and allogeneic EBV-transformed B-LCL that are either purchased from the American Society for Histocompatibility and Immunogenetics (ASHI, Boston, Mass.) or established from the pool of patients as described (Guilhot, et al. J. Virol. 66:2670-2678, 1992).

[0389] Cytotoxicity assays are performed in the following manner. Target cells consist of either allogeneic HLA-matched or autologous EBV-transformed B lymphoblastoid cell line that are incubated overnight with the synthetic peptide epitope of the invention at 10 μM, and labeled with 100 μCi of ⁵¹Cr (Amersham Corp., Arlington Heights, Ill.) for 1 hour after which they are washed four times with HBSS.

[0390] Cytolytic activity is determined in a standard 4-h, split well ⁵¹Cr release assay using U-bottomed 96 well plates containing 3,000 targets/well. Stimulated PBMC are tested at effector/target (E/T) ratios of 20-50:1 on day 14. Percent cytotoxicity is determined from the formula: 100×[(experimental release-spontaneous release)/maximum release-spontaneous release)]. Maximum release is determined by lysis of targets by detergent (2% Triton X-100; Sigma Chemical Co., St. Louis, Mo.). Spontaneous release is <25% of maximum release for all experiments.

[0391] The results of such an analysis indicate the extent to which HLA-restricted CTL populations have been stimulated by previous exposure to HBV or an HBV vaccine.

[0392] Class II restricted HTL responses an also be analyzed. Purified PBMC are cultured in a 96-well flat bottom plate at a density of 1.5×10⁵ cells/well and are stimulated with 10 μg/ml synthetic peptide, whole antigen, or PHA. Cells are routinely plated in replicates of 4-6 wells for each condition. After seven days of culture, the medium is removed and replaced with fresh medium containing 10 U/ml IL-2. Two days later, 1 μCi 3H-thymidine is added to each well and incubation is continued for an additional 18 hours. Cellular DNA is then harvested on glass fiber mats and analyzed for 3H-thymidine incorporation. Antigen-specific T cell proliferation is calculated as the ratio of 3H-thymidine incorporation in the presence of antigen divided by the 3H-thymidine incorporation in the absence of antigen.

### Example 18

### Induction of Specific CTL Response in Humans

[0393] A human clinical trial for an immunogenic composition comprising HBV CTL and HTL epitopes of the invention is set up as an SD Phase I, dose escalation study (5, 50 and 500 μg) and carried out as a randomized, double-blind, placebo-controlled trial. Such a trial is designed, for example, as follows:

[0394] A total of about 27 subjects are enrolled and divided into 3 groups:

[0395] Group I: 3 subjects are injected with placebo and 6 subjects are injected with 5 μg of peptide composition;

[0396] Group II: 3 subjects are injected with placebo and 6 subjects are injected with 50 μg peptide composition;

[0397] Group III: 3 subjects are injected with placebo and 6 subjects are injected with 500 μg of peptide composition.

[0398] After 4 weeks following the first injection, all subjects receive a booster inoculation at the same dosage.

[0399] The endpoints measured in this study relate to the safety and tolerability of the peptide composition as well as its immunogenicity. Cellular immune responses to the peptide composition are an index of the intrinsic activity of this the peptide composition, and can therefore be viewed as a measure of biological efficacy. The following summarize the clinical and laboratory data that relate to safety and efficacy endpoints.

[0400] Safety: The incidence of adverse events is monitored in the placebo and drug treatment group and assessed in terms of degree and reversibility.

[0401] Evaluation of Vaccine Efficacy: For evaluation of vaccine efficacy, subjects are bled before and after injection. Peripheral blood mononuclear cells are isolated from fresh heparinized blood by Ficoll-Hypaque density gradient centrifugation, aliquoted in freezing media and stored frozen. Samples are assayed for CTL and HTL activity.

[0402] Thus, the vaccine is found to be both safe and efficacious.

### Example 19

### Phase II Trials in Patients Infected with HBV

[0403] Phase II trials are performed to study the effect of administering the CTL-HTL peptide compositions to patients (male and female ) having chronic HBV infection. A main objective of the trials is to determine an effective dose and regimen for inducing CTLs in chronically infected HBV patients, to establish the safety of inducing a CTL response in these patients, and to see to what extent activation of CTLs improves the clinical picture of chronically infected CTL patients, as manifested by a transient flare in alanine aminotransferase (ALT), normalization of ALT, and reduction in HBV DNA. Such a study is designed, for example, as follows:

[0404] The studies are performed in multiple centers in the U.S. and Canada. The trial design is an open-label, uncontrolled, dose escalation protocol wherein the peptide composition is administered as a single dose followed six weeks later by a single booster shot of the same dose. The dosages are 50, 500 and 5,000 micrograms per injection. Drug-associated adverse effects are recorded.

[0405] There are three patient groupings. The first group is injected with 50 micrograms of the peptide composition and the second and third groups with 500 and 5,000 micrograms of peptide composition, respectively. The patients within each group range in age from 21-65 and include both males and females. The patients represent diverse ethnic backgrounds. All of them are infected with HBV for over five years and are HIV, HCV and HDV negative, but have positive levels of HBe antigen and HBs antigen.

[0406] The magnitude and incidence of ALT flares and the levels of HBV DNA in the blood are monitored to assess the effects of administering the peptide compositions. The levels of HBV DNA in the blood are an indirect indication of the progress of treatment. The vaccine composition is found to be both safe and efficacious in the treatment of chronic HBV infection.

### Example 20

### Induction of CTL Responses Using a Prime Boost Protocol

[0407] A prime boost protocol can also be used for the administration of the vaccine to humans. Such a vaccine regimen can include an initial administration of, for example, naked DNA followed by a boost using recombinant virus encoding the vaccine, or recombinant protein/polypeptide or a peptide mixture administered in an adjuvant.

[0408] For example, the initial immunization may be performed using an expression vector, such as that constructed in Example 11, in the form of naked nucleic acid administered IM (or SC or ID) in the amounts of 0.5-5 mg at multiple sites. The nucleic acid (0.1 to 1000 μg) can also be administered using a gene gun. Following an incubation period of 3-4 weeks, a booster dose is then administered. The booster can be recombinant fowlpox virus administered at a dose of 5×10⁷ to 5×10⁹ pfu. An alternative recombinant virus, such as an MVA, canarypox, adenovirus, or adeno-associated virus, can also be used for the booster, or the polyepitopic protein or a mixture of the peptides can be administered. For evaluation of vaccine efficacy, patient blood samples will be obtained before immunization as well as at intervals following administration of the initial vaccine and booster doses of the vaccine. Peripheral blood mononuclear cells are isolated from fresh heparinized blood by Ficoll-Hypaque density gradient centrifugation, aliquoted in freezing media and stored frozen. Samples are assayed for CTL and HTL activity.

[0409] The results indicate that a magnitude of response sufficient to achieve protective immunity against HBV or to treat HBV infection is generated.

### Example 21

### Administration of Vaccine Compositions Using Dendritic Cells (DC)

[0410] Vaccines comprising peptide epitopes of the invention can be administered using APCs, such as DC. In this example, the peptide-pulsed DC are administered to a patient to stimulate a CTL response in vivo. In this method, dendritic cells are isolated, expanded, and pulsed with a vaccine comprising peptide CTL and HTL epitopes of the invention. The dendritic cells are infused back into the patient to elicit CTL and HTL responses in vivo. The induced CTL and HTL then destroy or facilitate destruction of the specific target cells that bear the proteins from which the epitopes in the vaccine are derived.

[0411] For example, a cocktail of epitope-bearing peptides is administered ex vivo to PBMC, or isolated DC therefrom. A pharmaceutical to facilitate harvesting of DC can be used, such as Progenipoietin™ (Monsanto, St. Louis, Mo.) or GM-CSF/IL-4. After pulsing the DC with peptides and prior to reinfusion into patients, the DC are washed to remove unbound peptides.

[0412] As appreciated clinically, and readily determined by one of skill based on clinical outcomes, the number of DC reinfused into the patient can vary (see, e.g., Nature Med. 4:328, 1998; Nature Med. 2:52, 1996 and Prostate 32:272, 1997). Although 2-50×10⁶ DC per patient are typically administered, larger number of DC, such as 10⁷ or 10⁸ can also be provided. Such cell populations typically contain between 50-90% DC.

[0413] In some embodiments, peptide-loaded PBMC are injected into patients without purification of the DC. For example, PBMC containing DC generated after treatment with an agent such as Progenipoietin™ are injected into patients without purification of the DC. The total number of PBMC that are administered often ranges from 10⁸ to 10¹⁰. Generally, the cell doses injected into patients is based on the percentage of DC in the blood of each patient, as determined, for example, by immunofluorescence analysis with specific anti-DC antibodies. Thus, for example, if Progenipoietin™ mobilizes 2% DC in the peripheral blood of a given patient, and that patient is to receive 5×10⁶ DC, then the patient will be injected with a total of 2.5×10⁸ peptide-loaded PBMC. The percent DC mobilized by an agent such as Progenipoietin™ is typically estimated to be between 2-10%, but can vary as appreciated by one of skill in the art.

Ex vivo Activation of CTL/HTL Responses

[0414] Alternatively, ex vivo CTL or HTL responses to HPV antigens can be induced by incubating in tissue culture the patient's, or genetically compatible, CTL or HTL precursor cells together with a source of APC, such as DC, and the appropriate immunogenic peptides. After an appropriate incubation time (typically about 7-28 days), in which the precursor cells are activated and expanded into effector cells, the cells are infused back into the patient, where they will destroy (CTL) or facilitate destruction (HTL) of their specific target cells.

### Example 22

### Alternative Method of Identifying Motif-Bearing Peptides

[0415] Another method of identifying motif-bearing peptides is to elute them from cells bearing defined MHC molecules. For example, EBV transformed B cell lines used for tissue typing have been extensively characterized to determine which HLA molecules they express. In certain cases these cells express only a single type of HLA molecule. These cells can be infected with a pathogenic organism or transfected with nucleic acids that express the antigen of interest, e.g. HBV proteins. Peptides produced by endogenous antigen processing of peptides produced consequent to infection (or as a result of transfection) will then bind to HLA molecules within the cell and be transported and displayed on the cell surface. Peptides are then eluted from the HLA molecules by exposure to mild acid conditions and their amino acid sequence determined, e.g., by mass spectral analysis (e.g., Kubo et al., J. Immunol. 152:3913, 1994). Because the majority of peptides that bind a particular HLA molecule are motif-bearing, this is an alternative modality for obtaining the motif-bearing peptides correlated with the particular HLA molecule expressed on the cell.

[0416] Alternatively, cell lines that do not express endogenous HLA molecules can be transfected with an expression construct encoding a single HLA allele. These cells can then be used as described, i.e., they can be infected with a pathogen or transfected with nucleic acid encoding an antigen of interest to isolate peptides corresponding to the pathogen or antigen of interest that have been presented on the cell surface. Peptides obtained from such an analysis will bear motif(s) that correspond to-binding to the single HLA allele that is expressed in the cell.

[0417] As appreciated by one in the art, one can perform a similar analysis on a cell bearing more than one HLA allele and subsequently determine peptides specific for each HLA allele expressed. Moreover, one of skill would also recognize that means other than infection or transfection, such as loading with a protein antigen, can be used to provide a source of antigen to the cell.

[0418] The examples herein are provided to illustrate the invention but not to limit its scope. Other variants of the invention will be readily apparent to one of ordinary skill in the art and are encompassed by the appended claims. All publications, patents, and patent application cited herein are hereby incorporated by reference for all purposes.

[0419] TABLE IV

HLA Class I Standard Peptide Binding Affinity.

| | | | | |
|---|---|---|---|---|
| | | | | BINDING |
| | STANDARD | | | AFFINITY |
| ALLELE | PEPTIDE | SEQUENCE | SEQ ID NO: | (nM) |

| | | | | |
|---|---|---|---|---|
| A*0101 | 944.02 | YLEPAIAKY | 3475 | 25 |
| A*0201 | 941.01 | FLPSDYFPSV | 3476 | 5.0 |
| A*0202 | 941.01 | FLPSDYFPSV | 3476 | 4.3 |
| A*0203 | 941.01 | FLPSDYFPSV | 3476 | 10 |
| A*0206 | 941.01 | FLPSDYFPSV | 3476 | 3.7 |
| A*0207 | 941.01 | FLPSDYFPSV | 3476 | 23 |
| A*6802 | 1141.02 | FTQAGYPAL | 3477 | 40 |
| A*0301 | 941.12 | KVFPYALINK | 3478 | 11 |
| A*1101 | 940.06 | AVDLYHFLK | 3479 | 6.0 |
| A*3101 | 941.12 | KVFPYALINK | 3478 | 18 |
| A*3301 | 1083.02 | STLPETYVVRR | 3480 | 29 |
| A*6801 | 941.12 | KVFPYALINK | 3479 | 8.0 |
| A*2402 | 979.02 | AYIDNYNKF | 3481 | 12 |
| B*0702 | 1075.23 | APRTLVYLL | 3482 | 5.5 |
| B*3501 | 1021.05 | FPFKYAAAF | 3483 | 7.2 |
| B51 | 1021.05 | FPFKYAAAF | 3483 | 5.5 |
| B*5301 | 1021.05 | PPFKYAAAF | 3483 | 93 |
| B*5401 | 1021.05 | FPFKYAAAF | 3483 | 10 |

[0420] TABLE V

HLA Class II Standard Peptide Binding Affinity.

| | | | | | |
|---|---|---|---|---|---|
| | | | | | Binding |
| | | Standard | | SEQ ID | Affinity |
| Allele | Nomenclature | Peptide | Sequence | NO: | (nM) |

| | | | | | |
|---|---|---|---|---|---|
| DRB1*0101 | DR1 | 515.01 | PKYVKQNTLKLAT | 3484 | 5.0 |
| DRB1*0301 | DR3 | 829.02 | YKTIAFDEEARR | 3485 | 300 |
| DRB1*0401 | DR4w4 | 515.01 | PKYVKQNTLKLAT | 3484 | 45 |
| DRB1*0404 | DR4w14 | 717.01 | YARFQSQTTLKQKT | 3486 | 50 |
| DRB1*0405 | DR4w15 | 717.01 | YARFQSQTTLKQKT | 3486 | 38 |
| DRB1*0701 | DR7 | 553.01 | QYIKANSKFIGITE | 3487 | 25 |
| DRB1*0802 | DR8w2 | 553.01 | QYIKANSKFIGITE | 3487 | 49 |
| DRB1*0803 | DR8w3 | 553.01 | QYIKANSKFIGITE | 3487 | 1600 |
| DRB1*0901 | DR9 | 553.01 | QYIKANSKFIGITE | 3487 | 75 |
| DRB1*1101 | DR5w11 | 553.01 | QYIKANSKFIGITE | 3487 | 20 |
| DRB1*1201 | DR5w12 | 1200.05 | EALIHQLKINPYVLS | 3488 | 298 |
| DRB1*1302 | DR6w19 | 650.22 | QYIKANAKFIGITE | 3489 | 3.5 |
| DRB1*1501 | DR2w2β1 | 507.02 | GRTQDENPVVHFFKNI | 3490 | 9.1 |
| | | | VTPRTPPP | | |
| DRB3*0101 | DR52a | 511 | NGQIGNDPNRDIL | 3491 | 470 |
| DRB4*0101 | DRw53 | 717.01 | YARFQSQTTLKQKT | 3486 | 58 |
| DRB5*0101 | DR2w2β1 | 553.01 | QYIKANSKFIGITE | 3487 | 20 |

[0421] The “Nomenclature” column lists the allelic designations used in Tables XIX and XX.

[0422] TABLE VI

| HLA- | Allele-specific HLA-supertype members | |
|---|---|---|
| supertype | Verified^{a} | Predicted^{b} |
| A1 | A*0101, A*2501, A*2601, | A*0102, A*2604, A*3601, |
| | A*2602, A*3201 | A*4301, A*8001 |
| A2 | A*0201, A*0202, A*0203, | A*0208, A*0210, A*0211, |
| | A*0204, A*0205, A*0206, | A*0212, A*0213 |
| | A*0207, A*0209, A*0214, | |
| | A*6802, A*6901 | |
| A3 | A*0301, A*1101, A*3101, | A*0302, A*1102, A*2603, |
| | A*3301, A*6801 | A*3302, A*3303, A*3401, |
| | | A*3402, A*6601, A*6602, |
| | | A*7401 |
| A24 | A*2301, A*2402, A*3001 | A*2403, A*2404, A*3002, |
| | | A*3003 |
| B7 | B*0702, B*0703, B*0704, | B*1511, B*4201, B*5901 |
| | B*0705, B*1508, B*3501, | |
| | B*3502, B*3503, B*3504, | |
| | B*3505, B*3506, B*3507, | |
| | B*3508, B*5101, B*5102, | |
| | B*5103, B*5104, B*5105, | |
| | B*5301, B*5401, B*5501, | |
| | B*5502, B*5601, B*5602, | |
| | B*6701, B*7801 | |
| B27 | B*1401, B*1402, B*1509, | B*2701, B*2707, B*2708, |
| | B*2702, B*2703, B*2704, | B*3802, B*3903, B*3904, |
| | B*2705, B*2706, B*3801, | B*3905, B*4801, B*4802, |
| | B*3901, B*3902, B*7301 | B*1510, B*1518, B*1503 |
| B44 | B*1801, B*1802, B*3701, | B*4101, B*4501, B*4701, |
| | B*4402, B*4403, B*4404, | B*4901, B*5001 |
| | B*4001, B*4002, B*4006 | |
| B58 | B*5701, B*5702, B*5801, | |
| | B*5802, B*1516, B*1517 | |
| B62 | B*1501, B*1502, B*1513, | B*1301, B*1302, B*1504, |
| | B*5201 | B*1505, B*1506, B*1507, |
| | | B*1515, B*1520, B*1521, |
| | | B*1512, B*1514, B*1519 |

^{a}Verified alleles includes alleles whose specificity has been determined by pool sequencing analysis, peptide binding assays, or by analysis of the sequences of CTL epitopes.
^{b}Predicted alleles are alleles whose specificity is predicted on the basis of B and F pocket structure to overlap with the supertype specificity.

[0423] TABLE VII

HBV A01 SUPER MOTIF (With binding information)

| | | | | | | | |
|---|---|---|---|---|---|---|---|
| Conservancy | Freq. | Protein | Position | Sequence | SEQ ID NO: | String | A*0101 |

| | | | | | | | |
|---|---|---|---|---|---|---|---|
| 95 | 19 | POL | 521 | AJCSVVRRAF | 1 | XIXXXXXXXF | |
| 95 | 19 | NUC | 54 | ALRQAILCW | 2 | XLXXXXXXXW | |
| 80 | 16 | ENV | 108 | AMOWNSTTF | 3 | XMXXXXXXXF | |
| 100 | 20 | POL | 166 | ASFCGSPY | 4 | XSXXXXXY | |
| 100 | 20 | POL | 166 | ASFCGSPYSW | 5 | XSXXXXXXXW | |
| 90 | 18 | NUC | 19 | ASKLCLGW | 6 | XSXXXXXW | |
| 85 | 17 | NUC | 19 | ASKLCLGWLW | 7 | XSXXXXXXXW | |
| 80 | 16 | POL | 822 | ASPLHVAW | 8 | XSXXXXXW | |
| 100 | 20 | ENV | 312 | CIPIPSSW | 9 | XIXXXXXW | |
| 100 | 20 | ENV | 312 | CIPIPSSWAF | 10 | XIXXXXXXXF | |
| 95 | 19 | ENV | 253 | CLIFLLVLLDY | 11 | XLXXXXXXXXY | |
| 95 | 19 | ENV | 239 | CLRRFIIF | 12 | XLXXXXXF | |
| 75 | 15 | ENV | 239 | CLRRFIFLF | 13 | XLXXXXXXXF | |
| 95 | 19 | POL | 523 | CSVVRRAF | 14 | XSXXXXXF | |
| 100 | 20 | ENV | 310 | CTCIPIPSSW | 15 | XTXXXXXXXW | |
| 90 | 18 | NUC | 31 | DIDPYKEF | 16 | XIXXXXXF | |
| 85 | 17 | NUC | 29 | DLLDTASALY | 17 | XLXXXXXXXY | 11.1000 |
| 95 | 19 | ENV | 196 | DSWWTSLNF | 18 | XSXXXXXXF | |
| 95 | 19 | NUC | 43 | ELLSFLPSDF | 19 | XLXXXXXXXF | |
| 95 | 19 | NUC | 43 | ELLSFLPSDFF | 20 | XLXXXXXXXXF | |
| 95 | 19 | POL | 374 | ESRLVVDF | 21 | XSXXXXXF | |
| 95 | 19 | POL | 374 | ESRLVVDFSOF | 22 | XSXXXXXXXXF | |
| 80 | 16 | ENV | 248 | FILLLCLIF | 23 | XIXXXXXXF | |
| 80 | 16 | ENV | 246 | FLFILLLCLIF | 24 | XLXXXXXXXXF | |
| 95 | 19 | ENV | 256 | FLLVLLDY | 25 | XIXXXXXY | |
| 95 | 19 | POL | 658 | FSPTYKAF | 26 | XSXXXXXF | |
| 90 | 18 | X | 63 | FSSAGPCALRF | 27 | XSXXXXXXXXF | |
| 100 | 20 | ENV | 333 | FSWLSLLVPF | 28 | XSXXXXXXXF | |
| 95 | 19 | POL | 656 | FTFSPTYKAF | 29 | XTXXXXXXXF | |
| 95 | 19 | ENV | 346 | FVGLSPTVW | 30 | XVXXXXXXW | |
| 95 | 19 | POL | 627 | GLLGFAAPF | 31 | XLXXXXXXF | |
| 95 | 19 | POL | 509 | GLSPFLLAOF | 32 | XLXXXXXXXF | |
| 85 | 17 | NUC | 29 | GMDIDPYKEF | 33 | XMXXXXXXXF | |
| 95 | 19 | NUC | 123 | GVWIRTPPAY | 34 | XVXXXXXXXY | 0.0017 |
| 75 | 15 | POL | 569 | HLNPNKTKRW | 35 | XLXXXXXXXW | |
| 80 | 16 | POL | 491 | HLYSHPILGF | 36 | XLXXXXXXXXF | |
| 85 | 17 | POL | 715 | HTAELLAACF | 37 | XTXXXXXXXF | |
| 95 | 19 | NUC | 52 | HTALROAILCW | 38 | XTXXXXXXXXW | |
| 100 | 20 | POL | 149 | HTLWKAGILY | 39 | XTXXXXXXXY | 0.0300 |
| 100 | 20 | ENV | 249 | ILLLCUF | 40 | XLXXXXXF | |
| 80 | 16 | POL | 760 | ILRGTSFVY | 41 | XLXXXXXXY | 0.0017 |
| 90 | 18 | ENV | 188 | ILTIPOSLDSW | 42 | XLXXXXXXXXW | |
| 90 | 18 | POL | 625 | IVGLLGFAAPF | 43 | XVXXXXXXXXF | |
| 80 | 16 | POL | 503 | KIPMGVGLSPF | 44 | XIXXXXXXXXF | |
| 85 | 17 | NUC | 21 | KLCLGWLW | 45 | XLXXXXXW | |
| 75 | 15 | POL | 108 | KLIMPARF | 46 | XLXXXXXF | |
| 75 | 15 | POL | 108 | KLIMPARFY | 47 | XLXXXXXXXY | 0.0017 |
| 80 | 16 | POL | 610 | KLPVNRPIDW | 48 | XLXXXXXXXW | |
| 85 | 17 | POL | 574 | KTKRWGYSLNF | 49 | XTXXXXXXXXF | |
| 95 | 19 | POL | 55 | KVGNFTGLY | 50 | XVXXXXXXXY | 0.0680 |
| 95 | 19 | ENV | 254 | LIFLLVLLDY | 51 | XIXXXXXXXY | 0.0084 |
| 100 | 20 | POL | 109 | LIMPARFY | 52 | XIXXXXXY | |
| 85 | 17 | NUC | 30 | LLOTASALY | 53 | XLXXXXXXY | 25.0000 |
| 80 | 16 | POL | 752 | LLGCAANW | 54 | XLXXXXXXW | |
| 95 | 19 | POL | 628 | LLGFAAPF | 55 | XLXXXXXF | |
| 100 | 20 | ENV | 378 | LLPIFFCLW | 56 | XLXXXXXXXW | |
| 100 | 20 | ENV | 378 | LLPIFFCLWVY | 57 | XLXXXXXXXXY | |
| 95 | 19 | NUC | 44 | LLSFLPSDP | 58 | XLXXXXXXF | |
| 95 | 19 | NUC | 44 | LLSFLPSDFF | 59 | XLXXXXXXXF | |
| 90 | 18 | POL | 407 | LLSSNLSW | 60 | XLXXXXXXW | |
| 95 | 19 | ENV | 175 | LLVLQAGF | 61 | XLXXXXXF | |
| 95 | 19 | ENV | 175 | LLVLQAGFF | 62 | XLXXXXXXF | |
| 100 | 20 | ENV | 338 | LLVPFVQW | 63 | XLXXXXXW | |
| 100 | 20 | ENV | 338 | LLVPFVQWF | 64 | XLXXXXXXF | |
| 85 | 17 | NUC | 100 | LLWFHISCLTF | 65 | XLXXXXXXXXF | |
| 95 | 19 | NUC | 45 | LSFLPSDF | 66 | XSXXXXXF | |
| 95 | 19 | NUC | 45 | LSFLPSDFF | 67 | XSXXXXXXF | |
| 95 | 19 | POL | 415 | LSLDVSAAF | 68 | XSXXXXXXF | |
| 95 | 19 | POL | 415 | LSLDVSAAFY | 69 | XSXXXXXXXY | 4.2000 |
| 100 | 20 | ENV | 336 | LSLLVPFVQW | 70 | XSXXXXXXXW | |
| 100 | 20 | ENV | 336 | LSLLVPFQWF | 71 | XSXXXXXXXXF | |
| 95 | 19 | X | 53 | LSLRGLPVCAF | 72 | XSXXXXXXXXF | |
| 95 | 19 | POL | 510 | LSPFLLAQF | 73 | XSXXXXXXF | |
| 75 | 15 | ENV | 349 | LSPTVWLSVTW | 74 | XSXXXXXXXXW | |
| 85 | 17 | POL | 742 | LSRKYTSF | 75 | XSXXXXXF | |
| 85 | 17 | POL | 742 | LSRKYTSFPW | 76 | XSXXXXXXXW | |
| 75 | 15 | ENV | 16 | LSVPNPLGF | 77 | XSXXXXXXF | |
| 75 | 15 | NUC | 137 | LTFGRETVLEY | 78 | XTXXXXXXXXY | |
| 90 | 18 | ENV | 189 | LTIPQSLDSW | 79 | XTXXXXXXXW | |
| 90 | 18 | ENV | 189 | LTIPQSLDSWW | 80 | XTXXXXXXXXW | |
| 90 | 18 | POL | 404 | LTNLLSSNLSW | 81 | XTXXXXXXXXW | |
| 95 | 19 | ENV | 176 | LVLQAGFF | 82 | XVXXXXXF | |
| 100 | 20 | ENV | 339 | LVPFVQWF | 83 | XVXXXXXF | |
| 100 | 20 | POL | 377 | LVVDFSQF | 84 | XVXXXXXF | |
| 85 | 17 | ENV | 360 | MMWYWGPSLY | 85 | XMXXXXXXXY | 0.0810 |
| 75 | 15 | X | 103 | MSTTDLEAY | 86 | XSXXXXXXY | 0.8500 |
| 75 | 15 | X | 103 | MSTTDLEAYF | 87 | XSXXXXXXXXF | |
| 95 | 19 | POL | 42 | NLGNLNVSIPW | 88 | XLXXXXXXXXW | |
| 90 | 18 | POL | 406 | NLLSSNLSW | 89 | XLXXXXXXW | |
| 95 | 19 | POL | 45 | NLNSIPW | 90 | XLXXXXXW | |
| 75 | 15 | ENV8W | 15 | NLSVPNPLGF | 91 | XLXXXXXXXF | |
| 90 | 18 | POL | 738 | NSVVLSRKY | 92 | XSXXXXXXY | 0.0005 |
| 100 | 20 | ENV | 380 | PIFFCLWVY | 93 | XIXXXXXXY | 0.0078 |
| 100 | 20 | ENV | 314 | PIPSSWAF | 94 | XIXXXXXF | |
| 100 | 20 | POL | 124 | PLDKFIKPY | 95 | XLXXXXXXY | 0.0190 |
| 100 | 20 | POL | 124 | PLDKGIKPYY | 96 | XLXXXXXXXY | 0.1600 |
| 100 | 20 | ENV | 377 | PLLPIFFCLW | 97 | XXXXXXXXW | |
| 95 | 19 | ENV | 174 | PLLVLQAGF | 98 | XLXXXXXXF | |
| 95 | 19 | ENV | 174 | PLLVLQAGFF | 99 | XLXXXXXXXF | |
| 80 | 16 | POL | 505 | PMGVGLSPF | 100 | XMXXXXXXF | |
| 85 | 17 | POL | 797 | PTTGRTSLY | 101 | XTXXXXXXY | 0.7700 |
| 75 | 15 | ENV | 351 | PTVWSVTW | 102 | XTXXXXXXW | |
| 85 | 17 | POL | 612 | PNRPIDW | 103 | XVXXXXXW | |
| 95 | 19 | POL | 685 | QVFADATPTG | 104 | XVXXXXXXXXW | |
| 90 | 18 | POL | 624 | RIVGLLGF | 105 | XIXXXXXF | |
| 75 | 15 | POL | 106 | RLKIMPARF | 106 | XLXXXXXXXF | |
| 75 | 15 | POL | 106 | RLKLIMPARFY | 107 | XLXXXXXXXXY | |
| 95 | 19 | POL | 376 | RLVVDFSCF | 108 | XLXXXXXXF | |
| 90 | 18 | POL | 353 | RTPARVTGGVF | 109 | XTXXXXXXXXF | |
| 100 | 20 | POL | 49 | SIPWTHKVGNF | 110 | XIXXXXXXXXXF | |
| 95 | 19 | ENV | 194 | SLDSWWTSLNF | 111 | XLXXXXXXXXF | |
| 95 | 19 | POL | 416 | SLDVSAAF | 112 | XLXXXXXF | |
| 95 | 19 | POL | 416 | SLDVSAAFY | 113 | XLXXXXXXY | 17.2000 |
| 100 | 20 | ENV | 337 | SLLVPFQW | 114 | XLXXXXXXW | |
| 100 | 20 | ENV | 337 | SLLVPFQWF | 115 | XWXXXXXXXF | |
| 95 | 19 | X | 54 | SLRGLPVCAF | 116 | XLXXXXXXXF | |
| 90 | 18 | X | 64 | SSAGPCALRF | 117 | XSXXXXXXXF | |
| 75 | 15 | X | 104 | STTDLEAY | 118 | XTXXXXXY | |
| 75 | 15 | X | 104 | STTDLEAYF | 119 | XTXXXXXXF | |
| 75 | 15 | ENV | 17 | SVPNPLGF | 120 | XVXXXXXF | |
| 90 | 18 | POL | 739 | SVVLSRKY | 121 | XVXXXXXY | |
| 85 | 17 | POL | 739 | SVVLSRKYTSF | 122 | XVXXXXXXXXF | |
| 90 | 18 | ENV | 190 | TIPQSLDSW | 123 | XIXXXXXXW | |
| 90 | 18 | ENV | 190 | TIPQSLDSWW | 124 | XIXXXXXXXW | |
| 100 | 20 | POL | 150 | TLWKAGILY | 125 | XLXXXXXXXY | 0.0017 |
| 75 | 15 | X | 105 | TTDLEAYF | 126 | XTXXXXXF | |
| 85 | 17 | POL | 798 | TTGRTSLY | 127 | XTXXXXXY | |
| 80 | 16 | NUC | 16 | TVQASKLCLGW | 128 | XVXXXXXXXXW | |
| 75 | 15 | ENV | 352 | TVWLSVIW | 129 | XVXXXXXW | |
| 85 | 17 | POL | 741 | VLSRKYTSF | 130 | XLXXXXXXF | |
| 85 | 17 | POL | 741 | VLSRKYTSFPW | 131 | XLXXXXXXXXW | |
| 85 | 17 | POL | 740 | VVLSRKYTSF | 132 | XVXXXXXXXF | |
| 80 | 16 | POL | 759 | WILRGTSF | 133 | XIXXXXXF | |
| 80 | 18 | POL | 759 | WILRGTSFVY | 134 | XIXXXXXXXY | 0.0023 |
| 95 | 19 | NUC | 125 | WIRTPPAY | 135 | XIXXXXXY | |
| 80 | 16 | POL | 751 | WLLGCAANW | 136 | XLXXXXXXW | |
| 95 | 19 | POL | 414 | WLSLDVSAAF | 137 | XLXXXXXXXF | |
| 95 | 19 | POL | 414 | WLSLDVSAAFY | 138 | XLXXXXXXXXY | |
| 100 | 20 | ENV | 335 | WLSLLVPF | 139 | XLXXXXXF | |
| 100 | 20 | ENV | 335 | WLSLLVPFVQW | 140 | XLXXXXXXXXW | |
| 85 | 17 | NUC | 26 | WLWGMDIDPY | 141 | XLXXXXXXXY | 0.0810 |
| 95 | 19 | ENV | 237 | WMCLRRFIF | 142 | XMXXXXXXXF | |
| 85 | 17 | ENV | 359 | WMMWYWGPS | 143 | XMXXXXXXXXY | |
| 100 | 20 | POL | 52 | WTHKVGNF | 144 | XTXXXXXF | |
| 100 | 20 | POL | 122 | YLPLDKGIKPY | 145 | XLXXXXXXXXY | |
| 90 | 18 | NUC | 118 | YLVSFGVW | 146 | XLXXXXXW | |
| 80 | 16 | POL | 493 | YSHPIILGF | 147 | XSXXXXXXF | |
| 85 | 17 | POL | 580 | YSLNFMGY | 148 | XSXXXXXY | |

[0424] TABLE VIII

HBV A02 SUPER MOTIF (With binding information)

| | | | | | | | | | | | |
|---|---|---|---|---|---|---|---|---|---|---|---|
| | | | | | SEQ ID | | | | | | |
| Conservancy | Frequency | Protein | Position | Sequence | NO: | AA | A*0201 | A*0202 | A*0203 | A*0206 | A*6602 |

| | | | | | | | | | | | |
|---|---|---|---|---|---|---|---|---|---|---|---|
| 85 | 17 | POL | 721 | AACFARSRSGA | 149 | 11 | | | | | |
| 85 | 17 | POL | 431 | AAMPHLLV | 150 | 8 | | | | | |
| 80 | 16 | POL | 758 | AANWILRGT | 151 | 9 | | | | | |
| 95 | 19 | POL | 632 | AAPFTQCGYPA | 152 | 11 | | | | | |
| 95 | 19 | POL | 521 | AICSVVRRA | 153 | 9 | 0.0001 | | | | |
| 90 | 18 | NUC | 58 | AILCWGEL | 154 | 8 | | | | | |
| 90 | 18 | NUC | 58 | AILCWGELM | 155 | 9 | | | | | |
| 95 | 19 | POL | 642 | ALMPLYACI | 1 56 | 9 | 0.5000 | 0.0340 | 3.3000 | 0.2500 | 0.0470 |
| 80 | 16 | ENV | 108 | AMQWNSTT | 157 | 8 | | | | | |
| 75 | 15 | X | 102 | AMSTTDLEA | 158 | 9 | 0.0013 | | | | |
| 95 | 19 | POL | 516 | AQFTSAICSV | 159 | 10 | | | | | |
| 95 | 19 | POL | 516 | AQFTSAICSVV | 160 | 11 | | | | | |
| 95 | 19 | POL | 690 | ATPTGWGL | 161 | 8 | | | | | |
| 80 | 16 | POL | 690 | ATPTGWGLA | 162 | 9 | | | | | |
| 75 | 15 | POL | 690 | ATPTGWGLAI | 163 | 10 | | | | | |
| 95 | 19 | POL | 397 | AVPNLQSL | 164 | 8 | | | | | |
| 95 | 19 | POL | 397 | AVPNLQSLT | 165 | 9 | 0.0001 | | | | |
| 95 | 19 | POL | 397 | AVPNLQSLTNL | 166 | 11 | | | | | |
| 80 | 16 | POL | 755 | CAANWILRGT | 167 | 10 | | | | | |
| 95 | 19 | X | 61 | CAFSSAGPCA | 168 | 10 | 0.0001 | | | | |
| 95 | 19 | X | 61 | CAFSSAGPCAL | 169 | 11 | | | | | |
| 90 | 18 | X | 69 | CALRFTSA | 170 | 8 | | | | | |
| 100 | 20 | ENV | 312 | CIPIPSSWA | 171 | 9 | 0.0010 | | | | |
| 80 | 16 | ENV | 312 | CIPIPSSWAFA | 172 | 11 | | | | | |
| 90 | 18 | POL | 533 | CLAFSYMDDV | 173 | 10 | 0.0008 | | | | |
| 90 | 18 | POL | 533 | CLAFSYMDDVV | 174 | 11 | | | | | |
| 85 | 17 | NUC | 23 | CLGWLWGM | 175 | 8 | | | | | |
| 85 | 17 | NUC | 23 | CLGWLWGMDI | 176 | 10 | 0.0093 | | | | |
| 100 | 20 | ENV | 253 | CLIFLLVL | 177 | 8 | 0.0002 | | | | |
| 100 | 20 | ENV | 253 | CLIFLLVLL | 178 | 9 | 0.0006 | | | | |
| 95 | 19 | ENV | 239 | CLRRFIIFL | 179 | 9 | 0.0002 | | | | |
| 75 | 15 | ENV | 239 | CLRRFIIFLFI | 180 | 11 | 0.0004 | | | | |
| 90 | 18 | NUC | 107 | CLTFGRET | 181 | 8 | | | | | |
| 90 | 18 | NUC | 107 | CLTFGRETV | 182 | 9 | 0.0001 | | | | |
| 80 | 16 | X | 7 | CQLDPARDV | 183 | 9 | | | | | |
| 80 | 16 | X | 7 | CQLDPARDVL | 184 | 10 | | | | | |
| 85 | 17 | POL | 622 | CQRIVGLL | 185 | 8 | | | | | |
| 85 | 17 | POL | 622 | CQRIVGLLGFA | 186 | 11 | | | | | |
| 95 | 19 | POL | 684 | CQVFADAT | 187 | 8 | | | | | |
| 95 | 19 | POL | 684 | CQVFADATPT | 188 | 10 | | | | | |
| 100 | 20 | ENV | 310 | CTCIPIPSSWA | 189 | 11 | | | | | |
| 95 | 19 | POL | 689 | DATPTGWGL | 190 | 9 | 0.0001 | | | | |
| 80 | 16 | POL | 689 | DATPTGWGLA | 191 | 10 | | | | | |
| 75 | 15 | POL | 689 | DATPTGWGLAI | 192 | 11 | | | | | |
| 90 | 18 | NUC | 31 | DIDPYKEFGA | 193 | 10 | | | | | |
| 85 | 17 | NUC | 29 | DLLDTASA | 194 | 8 | | | | | |
| 85 | 17 | NUC | 29 | DLLDTASAL | 195 | 9 | 0.0001 | | | | |
| 95 | 19 | POL | 40 | DLNLGNLNV | 196 | 9 | 0.0004 | | | | |
| 95 | 19 | POL | 40 | DLNLGNLNVSI | 197 | 11 | | | | | |
| 80 | 16 | NUC | 32 | DTASALYREA | 198 | 10 | | | | | |
| 80 | 16 | NUC | 32 | DTASALYREAL | 199 | 11 | | | | | |
| 95 | 19 | X | 14 | DVLCLRPV | 200 | 8 | | | | | |
| 95 | 19 | X | 14 | DVLCLRPVGA | 201 | 10 | 0.0001 | | | | |
| 90 | 18 | POL | 541 | DVVLGAKSV | 202 | 9 | 0.0003 | | | | |
| 100 | 20 | POL | 17 | EAGPLEEEL | 203 | 9 | 0.0001 | | | | |
| 80 | 16 | X | 122 | ELGEERL | 204 | 8 | | | | | |
| 90 | 18 | POL | 718 | ELLAACFA | 205 | 8 | | | | | |
| 75 | 15 | NUC | 142 | ETVLEYLV | 206 | 8 | | | | | |
| 95 | 19 | POL | 687 | FADATPTGWGL | 207 | 11 | | | | | |
| 85 | 17 | POL | 724 | FARSRSGA | 208 | 8 | | | | | |
| 80 | 16 | POL | 821 | FASPLHVA | 209 | 8 | | | | | |
| 95 | 19 | POL | 396 | FAVPNLQSL | 210 | 9 | | | | | |
| 95 | 19 | POL | 396 | FAVPNLQSLT | 211 | 10 | 0.0003 | | | | |
| 80 | 16 | ENV | 243 | FIIFLFIL | 212 | 8 | 0.0006 | | | | |
| 80 | 16 | ENV | 243 | FIIFLFILL | 213 | 9 | 0.0002 | | | | |
| 80 | 18 | ENV | 243 | FIIFLFILLL | 214 | 10 | 0.0012 | | | | |
| 80 | 16 | ENV | 248 | FILLLCLI | 215 | 8 | 0.0003 | | | | |
| 80 | 16 | ENV | 248 | FILLLCLIFL | 216 | 10 | 0.0280 | | | | |
| 80 | 16 | ENV | 248 | FILLLCLIFLL | 217 | 11 | 0.0010 | | | | |
| 80 | 16 | ENV | 246 | FLFILLLCL | 218 | 9 | 0.0002 | | | | |
| 80 | 16 | ENV | 246 | FLFILLLCLI | 219 | 10 | 0.0013 | | | | |
| 75 | 15 | ENV | 171 | FLGPLLVL | 220 | 8 | | | | | |
| 75 | 15 | ENV | 171 | FLGPLLVLQA | 221 | 10 | 0.0190 | | | | |
| 95 | 19 | POL | 513 | FLLAQFTSA | 222 | 9 | 0.2400 | | | | |
| 95 | 19 | POL | 513 | FLLAQFTSAI | 223 | 10 | 0.2100 | 0.0320 | 7.0000 | 0.1100 | 0.0880 |
| 95 | 19 | POL | 562 | FLLSLGIHL | 224 | 9 | 0.6500 | 0.0010 | 0.0100 | 0.1100 | 0.0035 |
| 80 | 16 | ENV | 183 | FLLTRILT | 225 | 8 | | | | | |
| 80 | 16 | ENV | 183 | FLLTRILTI | 226 | 9 | 0.5100 | 0.0430 | 8.0000 | 0.2000 | 0.0010 |
| 95 | 19 | ENV | 256 | FLLVLLDYQGM | 227 | 11 | | | | | |
| 100 | 20 | POL | 363 | FLVDKNPHNT | 228 | 10 | 0.0012 | | | | |
| 95 | 19 | POL | 656 | FTFSPTYKA | 229 | 9 | 0.0056 | 0.0150 | 0.0031 | 0.8000 | 7.3000 |
| 95 | 19 | POL | 656 | FTFSPTYKAFL | 230 | 11 | | | | | |
| 95 | 19 | POL | 59 | FTGLYSST | 231 | 8 | | | | | |
| 90 | 18 | POL | 59 | FTGLYSSTV | 232 | 9 | 0.0005 | | | | |
| 95 | 19 | POL | 635 | FTQCGYPA | 233 | 8 | | | | | |
| 95 | 19 | POL | 835 | FTQCGYPAL | 234 | 9 | 0.0009 | | | | |
| 95 | 19 | POL | 635 | FTQCGYPALM | 235 | 10 | 0.0024 | | | | |
| 95 | 19 | POL | 518 | FTSAICSV | 236 | 8 | | | | | |
| 95 | 19 | POL | 518 | FTSAICSVV | 237 | 9 | 0.0090 | | | | |
| 95 | 19 | ENV | 346 | FVGLSPTV | 238 | 8 | | | | | |
| 95 | 19 | ENV | 346 | FVGLSPTVWL | 239 | 10 | 0.0008 | | | | |
| 90 | 18 | X | 132 | FVLGGCRHKL | 240 | 10 | 0.0030 | | | | |
| 90 | 18 | X | 132 | FVLGGCRHKLV | 241 | 11 | | | | | |
| 95 | 19 | ENV | 342 | FVQWFVGL | 242 | 8 | | | | | |
| 95 | 19 | ENV | 342 | FVQWFVGLSPT | 243 | 11 | | | | | |
| 90 | 18 | POL | 768 | FVYVPSAL | 244 | 8 | | | | | |
| 90 | 18 | POL | 766 | FVYVPSALNPA | 245 | 11 | | | | | |
| 95 | 19 | X | 50 | GAHLSLRGL | 246 | 9 | 0.0001 | | | | |
| 90 | 18 | X | 50 | GAHLSLRGLPV | 247 | 11 | | | | | |
| 85 | 17 | POL | 545 | GAKSVQHL | 248 | 8 | | | | | |
| 85 | 17 | POL | 545 | GAKSVQHLESL | 249 | 11 | | | | | |
| 75 | 15 | POL | 567 | GIHLNPNKT | 250 | 9 | | | | | |
| 90 | 18 | POL | 155 | GILYKRET | 251 | 8 | | | | | |
| 90 | 18 | POL | 155 | GILYKRETT | 252 | 9 | | | | | |
| 85 | 17 | POL | 682 | GLCQVFADA | 253 | 9 | 0.0024 | | | | |
| 85 | 17 | POL | 682 | GLCQVFADAT | 254 | 10 | | | | | |
| 95 | 19 | POL | 627 | GLLGFAAPFT | 255 | 10 | 0.0049 | | | | |
| 85 | 17 | ENV | 62 | GLLGWSPQA | 256 | 9 | 0.4000 | 0.0003 | 0.0350 | 0.2800 | 0.0005 |
| 95 | 19 | X | 57 | GLPVCAFSSA | 257 | 10 | 0.0008 | | | | |
| 95 | 19 | POL | 509 | GLSPFLLA | 258 | 8 | | | | | |
| 95 | 19 | POL | 509 | GLSPFLLAQFT | 259 | 11 | | | | | |
| 100 | 20 | ENV | 348 | GLSPTVWL | 260 | 8 | 0.0036 | | | | |
| 75 | 15 | ENV | 348 | GLSPTVWLSV | 261 | 10 | 0.2800 | | | | |
| 75 | 15 | ENV | 348 | GLSPTVWLSVI | 262 | 11 | 0.0036 | | | | |
| 90 | 18 | ENV | 265 | GMLPVCPL | 263 | 8 | | | | | |
| 90 | 18 | POL | 735 | GTDNSVVL | 264 | 8 | | | | | |
| 75 | 15 | ENV | 13 | GTNLSVPNPL | 265 | 10 | | | | | |
| 80 | 16 | POL | 763 | GTSFVYVPSA | 266 | 10 | | | | | |
| 80 | 16 | POL | 763 | GTSFVYVPSAL | 267 | 11 | | | | | |
| 80 | 16 | POL | 507 | GVGLSPFL | 268 | 8 | | | | | |
| 80 | 16 | POL | 507 | GVGLSPFLL | 269 | 9 | 0.0002 | | | | |
| 80 | 18 | POL | 507 | GVGLSPFLLA | 270 | 10 | | | | | |
| 95 | 19 | NUC | 123 | GVWIRTPPA | 271 | 9 | 0.0030 | | | | |
| 90 | 18 | NUC | 104 | HISCLTFGRET | 272 | 11 | | | | | |
| 80 | 16 | POL | 435 | HLLVGSSGL | 273 | 9 | 0.0031 | | | | |
| 90 | 18 | X | 52 | HLSLRGLPV | 274 | 9 | 0.0014 | | | | |
| 90 | 18 | X | 52 | HLSLRGLPVCA | 275 | 11 | | | | | |
| 80 | 16 | POL | 491 | HLYSHPII | 276 | 8 | | | | | |
| 80 | 16 | POL | 491 | HLYSHPIIL | 277 | 9 | 0.2200 | 0.0003 | 0.9300 | 0.1700 | 0.0530 |
| 85 | 17 | POL | 715 | HTAELLAA | 278 | 8 | | | | | |
| 85 | 17 | POL | 715 | HTAELLAACFA | 279 | 11 | | | | | |
| 100 | 20 | NUC | 52 | HTALRQAI | 280 | 8 | | | | | |
| 95 | 19 | NUC | 52 | HTALRQAIL | 281 | 9 | 0.0001 | | | | |
| 100 | 20 | POL | 149 | HTLWKAGI | 282 | 8 | | | | | |
| 100 | 20 | POL | 149 | HTLWKAGIL | 283 | 9 | 0.0001 | | | | |
| 80 | 16 | ENV | 244 | IIFIFILL | 284 | 8 | 0.0004 | | | | |
| 80 | 16 | ENV | 244 | IIFIFILIL | 285 | 9 | 0.0002 | | | | |
| 80 | 16 | ENV | 244 | IIFLFILILCL | 286 | 11 | 0.0002 | | | | |
| 80 | 16 | POL | 497 | IILGFRKI | 287 | 8 | | | | | |
| 80 | 18 | POL | 497 | IILGFRKIPM | 288 | 10 | | | | | |
| 90 | 18 | NUC | 59 | ILCWGELM | 289 | 8 | | | | | |
| 80 | 16 | POL | 498 | ILGFRKIPM | 290 | 9 | 0.0002 | | | | |
| 100 | 20 | ENV | 249 | ILLLCLIFI | 291 | 9 | 0.0015 | | | | |
| 100 | 20 | ENV | 249 | ILLLCLIFIL | 292 | 10 | 0.0190 | 0.0001 | 0.0002 | 0.1300 | 0.0015 |
| 100 | 20 | ENV | 249 | ILLLCLIFLLV | 293 | 11 | 0.0056 | | | | |
| 80 | 16 | POL | 760 | ILRGTSFV | 294 | 8 | | | | | |
| 80 | 16 | POL | 760 | ILRGTSFVYV | 295 | 10 | 0.0160 | | | | |
| 100 | 20 | NUC | 139 | ILSTLPET | 296 | 8 | | | | | |
| 100 | 20 | NUC | 139 | ILSTLPETT | 297 | 9 | 0.0001 | | | | |
| 100 | 20 | NUC | 139 | ILSTLPETTV | 298 | 10 | 0.0210 | 0.0085 | 0.0770 | 0.3100 | 0.0067 |
| 100 | 20 | NUC | 139 | ILSTLPETTVV | 299 | 11 | | | | | |
| 95 | 19 | ENV | 188 | ILTIPQSL | 300 | 8 | | | | | |
| 90 | 18 | POL | 156 | ILYKRETT | 301 | 8 | | | | | |
| 90 | 18 | POL | 625 | IVGLLGFA | 302 | 8 | | | | | |
| 90 | 18 | POL | 625 | IVGLLGFAA | 303 | 9 | 0.0009 | | | | |
| 90 | 18 | POL | 153 | KAGILYKRET | 304 | 10 | | | | | |
| 90 | 18 | POL | 153 | KAGILYKRETT | 305 | 11 | | | | | |
| 80 | 16 | POL | 503 | KIPMGVGL | 306 | 8 | | | | | |
| 85 | 17 | NUC | 21 | KLCLGWLWGM | 307 | 10 | 0.0001 | | | | |
| 95 | 19 | POL | 489 | KLHLYSHPI | 308 | 9 | 0.0690 | 0.0340 | 2.7000 | 0.5900 | 0.0015 |
| 80 | 16 | POL | 489 | KLHLYSHPII | 309 | 10 | | | | | |
| 80 | 16 | POL | 489 | KLHLYSHPIIL | 310 | 11 | | | | | |
| 80 | 16 | POL | 610 | KLPVNRPI | 311 | 8 | | | | | |
| 95 | 19 | POL | 653 | KQAFTFSPT | 312 | 9 | | | | | |
| 95 | 19 | POL | 574 | KTKRWGYSL | 313 | 9 | 0.0001 | | | | |
| 85 | 17 | POL | 620 | KVCQRIVGL | 314 | 9 | 0.0003 | | | | |
| 85 | 17 | POL | 620 | KVCQRIVGLL | 315 | 10 | 0.0001 | | | | |
| 95 | 19 | POL | 55 | KVGNFTGL | 316 | 8 | | | | | |
| 85 | 17 | X | 91 | KVLHKRTL | 317 | 8 | | | | | |
| 85 | 17 | X | 91 | KVLHKRTLGL | 318 | 10 | 0.0004 | | | | |
| 90 | 18 | POL | 534 | LAFSYMDDV | 319 | 9 | 0.0002 | | | | |
| 90 | 18 | POL | 534 | LAFSYMDDVV | 320 | 10 | 0.0003 | | | | |
| 90 | 18 | POL | 534 | LAFSYMDDVVL | 321 | 11 | | | | | |
| 95 | 19 | POL | 515 | LAQFTSAI | 322 | 8 | | | | | |
| 95 | 19 | POL | 515 | LAQFTSAICSV | 323 | 11 | | | | | |
| 100 | 20 | ENV | 254 | LIFLLVLL | 324 | 8 | 0.0025 | | | | |
| 95 | 19 | POL | 514 | LLAQFTSA | 325 | 8 | | | | | |
| 95 | 19 | POL | 514 | LLAQFTSAI | 326 | 9 | 0.1000 | 0.2700 | 3.7000 | 0.2600 | 0.7900 |
| 100 | 20 | ENV | 251 | LLCLIFLL | 327 | 8 | 0.0004 | | | | |
| 100 | 20 | ENV | 251 | LLCLIFLLV | 328 | 9 | 0.0048 | | | | |
| 100 | 20 | ENV | 251 | LLCLIFLLVL | 329 | 10 | 0.0075 | | | | |
| 100 | 20 | ENV | 251 | LLCLIFLLVLL | 330 | 11 | 0.0013 | | | | |
| 85 | 17 | NUC | 30 | LLDTASAL | 331 | 8 | | | | | |
| 95 | 19 | ENV | 260 | LLDYQGML | 332 | 8 | 0.0004 | | | | |
| 90 | 18 | ENV | 260 | LLDYQGMLPV | 333 | 10 | 0.0980 | 0.0001 | 0.0200 | 0.6700 | 0.0009 |
| 80 | 16 | POL | 752 | LLGCAANWI | 334 | 9 | 0.0011 | | | | |
| 80 | 16 | POL | 752 | LLGCAANWIL | 335 | 10 | 0.0140 | | | | |
| 95 | 19 | POL | 628 | LLGFAAPFT | 336 | 9 | 0.0008 | | | | |
| 85 | 17 | ENV | 63 | LLGWSPQA | 337 | 8 | | | | | |
| 75 | 15 | ENV | 63 | LLGWSPQAQGI | 338 | 11 | | | | | |
| 100 | 20 | ENV | 250 | LLLCLIFL | 339 | 8 | 0.0006 | | | | |
| 100 | 20 | ENV | 250 | LLLCLIFLL | 340 | 9 | 0.0065 | | | | |
| 100 | 20 | ENV | 250 | LLLCLIFLLV | 341 | 10 | 0.0036 | | | | |
| 100 | 20 | ENV | 250 | LLLCLIFLLVL | 342 | 11 | 0.0005 | | | | |
| 100 | 20 | ENV | 378 | LLPIFFCL | 343 | 8 | 0.0055 | | | | |
| 100 | 20 | ENV | 378 | LLPIFFCLWV | 344 | 10 | 0.0320 | 0.0008 | 0.0150 | 0.8000 | 0.0005 |
| 95 | 19 | POL | 563 | LLSLGIHL | 345 | 8 | | | | | |
| 90 | 18 | POL | 407 | LLSSNLSWL | 346 | 9 | 0.0110 | 0.0780 | 3.9000 | 0.2700 | 0.0100 |
| 90 | 18 | POL | 407 | LLSSNLSWLSL | 347 | 11 | | | | | |
| 80 | 16 | ENV | 184 | LLTRILTI | 348 | 8 | 0.0026 | | | | |
| 80 | 16 | POL | 436 | LLVGSSGL | 349 | 8 | | | | | |
| 95 | 19 | ENV | 257 | LLVLLDYQGM | 350 | 10 | 0.0050 | | | | |
| 95 | 19 | ENV | 257 | LLVLLDYQGML | 351 | 11 | | | | | |
| 90 | 18 | ENV | 175 | LLVLQAGFFL | 352 | 10 | 0.0310 | 0.0037 | 0.0045 | 0.1500 | 0.0110 |
| 90 | 18 | ENV | 175 | LLVLQAGFFLL | 353 | 11 | 0.0074 | | | | |
| 95 | 19 | ENV | 338 | LLVPFVQWFV | 354 | 10 | 0.6700 | 0.3800 | 1.7000 | 0.2900 | 0.1400 |
| 90 | 18 | NUC | 100 | LLWFHISCL | 355 | 9 | 0.0130 | 0.0002 | 0.0420 | 0.3100 | 0.0098 |
| 85 | 17 | NUC | 100 | LLWFHISCLT | 356 | 10 | | | | | |
| 95 | 19 | POL | 643 | LMPLYACI | 357 | 8 | | | | | |
| 95 | 19 | ENV | 178 | LQAGFFLL | 358 | 8 | | | | | |
| 95 | 19 | ENV | 178 | LQAGFFLLT | 359 | 9 | | | | | |
| 80 | 16 | ENV | 178 | LQAGFFLLTRI | 360 | 11 | | | | | |
| 100 | 20 | POL | 401 | LQSLTNLL | 361 | 8 | | | | | |
| 95 | 19 | NUC | 108 | LTFGRETV | 362 | 8 | | | | | |
| 75 | 15 | NUC | 137 | LTFGRETVL | 363 | 9 | | | | | |
| 90 | 18 | POL | 404 | LTNLLSSNL | 364 | 9 | | | | | |
| 80 | 18 | ENV | 185 | LTRILTIPQSL | 365 | 11 | | | | | |
| 85 | 17 | POL | 99 | LTVNEKRRL | 366 | 9 | | | | | |
| 100 | 20 | POL | 364 | LVDKNPHNT | 367 | 9 | 0.0001 | | | | |
| 95 | 19 | ENV | 258 | LVLLDYQGM | 368 | 9 | 0.0001 | | | | |
| 95 | 19 | ENV | 258 | LVLLDYQGML | 369 | 10 | 0.0001 | | | | |
| 90 | 18 | ENV | 176 | LVLQAGFFL | 370 | 9 | 0.0096 | | | | |
| 90 | 18 | ENV | 176 | LVLQAGFFLL | 371 | 10 | 0.0022 | | | | |
| 90 | 18 | ENV | 176 | LVLQAGFFLLT | 372 | 11 | | | | | |
| 95 | 19 | ENV | 339 | LVPFVQWFV | 373 | 9 | 0.0420 | 0.0150 | 0.0048 | 0.7900 | 2.8000 |
| 95 | 19 | ENV | 339 | LVPFVQWFVGL | 374 | 11 | | | | | |
| 90 | 18 | NUC | 119 | LVSFGVWI | 375 | 8 | 0.0004 | | | | |
| 90 | 18 | NUC | 119 | LVSFGVWIRT | 376 | 10 | | | | | |
| 85 | 17 | ENV | 360 | MMWYWGPSL | 377 | 9 | 0.6400 | | | | |
| 75 | 15 | NUC | 1 | MQLFHLCL | 378 | 8 | | | | | |
| 100 | 20 | NUC | 136 | NAPILSTL | 379 | 8 | | | | | |
| 100 | 20 | NUC | 136 | NAPILSTLPET | 380 | 11 | | | | | |
| 95 | 19 | POL | 42 | NLGNLNVSI | 381 | 9 | 0.0047 | | | | |
| 90 | 18 | POL | 406 | NLLSSNLSWL | 382 | 10 | 0.0016 | | | | |
| 95 | 19 | POL | 45 | NLNVSIPWT | 383 | 9 | 0.0005 | | | | |
| 100 | 20 | POL | 400 | NLQSLTNL | 384 | 8 | | | | | |
| 100 | 20 | POL | 400 | NLQSLTNLL | 385 | 9 | 0.0047 | | | | |
| 75 | 15 | ENV | 15 | NLSVPNPL | 386 | 8 | | | | | |
| 90 | 18 | POL | 411 | NLSWLSLDV | 387 | 9 | 0.0650 | 0.0051 | 0.6400 | 0.1600 | 0.0990 |
| 90 | 18 | POL | 411 | NLSWLSLDVSA | 388 | 11 | | | | | |
| 100 | 20 | POL | 47 | NVSIPWTHKV | 389 | 10 | 0.0001 | | | | |
| 100 | 20 | POL | 430 | PAAMPHLL | 390 | 8 | | | | | |
| 85 | 17 | POL | 430 | PAAMPHLLV | 391 | 9 | | | | | |
| 90 | 18 | POL | 775 | PADDPSRGRL | 392 | 10 | | | | | |
| 90 | 18 | ENV | 131 | PAGGSSSGT | 393 | 9 | | | | | |
| 90 | 18 | ENV | 131 | PAGGSSSGTV | 394 | 10 | | | | | |
| 95 | 19 | POL | 641 | PALMPLYA | 395 | 8 | | | | | |
| 95 | 19 | POL | 641 | PALMPLYACI | 396 | 10 | 0.0001 | | | | |
| 75 | 15 | X | 145 | PAPCNFFT | 397 | 8 | | | | | |
| 75 | 15 | X | 145 | PAPCNFFTSA | 398 | 10 | | | | | |
| 80 | 16 | X | 11 | PARDVLCL | 399 | 8 | | | | | |
| 75 | 15 | X | 11 | PARDVLCLRPV | 400 | 11 | | | | | |
| 90 | 18 | POL | 355 | PARVTGGV | 401 | 8 | | | | | |
| 90 | 18 | POL | 355 | PARVTGGVFL | 402 | 10 | | | | | |
| 90 | 18 | POL | 355 | PARVTGGVFLV | 403 | 11 | | | | | |
| 95 | 19 | NUC | 130 | PAYRPPNA | 404 | 8 | | | | | |
| 95 | 19 | NUC | 130 | PAYRPPNAPI | 405 | 10 | 0.0001 | | | | |
| 95 | 19 | NUC | 130 | PAYRPPNAPIL | 406 | 11 | | | | | |
| 85 | 17 | POL | 616 | PIDWKVCQRI | 407 | 10 | 0.0001 | | | | |
| 85 | 17 | POL | 616 | PIDWKVCQRIV | 408 | 11 | | | | | |
| 100 | 20 | ENV | 380 | PIFFCLWV | 409 | 8 | | | | | |
| 100 | 20 | ENV | 380 | PIFFCLWVYI | 410 | 10 | 0.0004 | | | | |
| 85 | 17 | POL | 713 | PIHTAELL | 411 | 8 | | | | | |
| 85 | 17 | POL | 713 | PIHTAELLA | 412 | 9 | | | | | |
| 85 | 17 | POL | 713 | PIHTAELLAA | 413 | 10 | | | | | |
| 80 | 16 | POL | 496 | PIILGFRKI | 414 | 9 | 0.0001 | | | | |
| 80 | 18 | POL | 496 | PIILGFRKIPM | 415 | 11 | | | | | |
| 100 | 20 | NUC | 138 | PILSTIPET | 416 | 9 | 0.0001 | | | | |
| 100 | 20 | NUC | 138 | PILSTLPETT | 417 | 10 | 0.0001 | | | | |
| 100 | 20 | NUC | 138 | PILSTLPETTV | 418 | 11 | 0.0001 | | | | |
| 80 | 16 | ENV | 314 | PIPSSWAFA | 419 | 9 | | | | | |
| 95 | 19 | POL | 20 | PLEEELPRL | 420 | 9 | 0.0003 | | | | |
| 90 | 18 | POL | 20 | PLEEELPRLA | 421 | 10 | 0.0001 | | | | |
| 95 | 19 | ENV | 10 | PLGFFPDHQL | 422 | 10 | 0.0002 | | | | |
| 100 | 20 | POL | 427 | PLHPAAMPHL | 423 | 10 | 0.0001 | | | | |
| 100 | 20 | POL | 427 | PLHPAAMPHLL | 424 | 11 | | | | | |
| 100 | 20 | ENV | 377 | PLLPIFFCL | 425 | 9 | 0.0650 | 0.0001 | 0.0018 | 0.1100 | 0.0047 |
| 100 | 20 | ENV | 377 | PLLPIFFCLWV | 426 | 11 | | | | | |
| 90 | 18 | ENV | 174 | PLLVLQAGFFL | 427 | 11 | 0.0008 | | | | |
| 80 | 16 | POL | 711 | PLPIHTAEL | 428 | 9 | 0.0004 | | | | |
| 80 | 16 | POL | 711 | PLPIHTAELL | 429 | 10 | 0.0001 | | | | |
| 80 | 16 | POL | 711 | PLPIHTAELLA | 430 | 11 | | | | | |
| 75 | 15 | POL | 2 | PLSYQHFRKL | 431 | 10 | 0.0001 | | | | |
| 75 | 15 | POL | 2 | PLSYQHFRKLL | 432 | 11 | | | | | |
| 85 | 17 | POL | 98 | PLTVNEKRRL | 433 | 10 | 0.0001 | | | | |
| 80 | 16 | POL | 505 | PMGVGLSPFL | 434 | 10 | 0.0001 | | | | |
| 80 | 16 | POL | 505 | PMGVGLSPFLL | 435 | 11 | | | | | |
| 95 | 19 | ENV | 106 | PQAMQWNST | 436 | 9 | | | | | |
| 80 | 16 | ENV | 106 | PQAMQWNSTT | 437 | 10 | | | | | |
| 90 | 18 | ENV | 192 | PQSLDSWWT | 438 | 9 | | | | | |
| 90 | 18 | ENV | 192 | PQSLDSWWTSL | 439 | 11 | | | | | |
| 75 | 15 | POL | 692 | PTGWGLAI | 440 | 8 | | | | | |
| 80 | 16 | ENV | 219 | PTSNHSPT | 441 | 8 | | | | | |
| 85 | 17 | POL | 797 | PTTGRTSL | 442 | 8 | | | | | |
| 85 | 17 | POL | 797 | PTTGRTSLYA | 443 | 10 | | | | | |
| 80 | 16 | NUC | 15 | PTVQASKL | 444 | 8 | | | | | |
| 80 | 16 | NUC | 15 | PTVQASKLCL | 445 | 10 | | | | | |
| 75 | 15 | ENV | 351 | PTVWLSVI | 446 | 8 | | | | | |
| 75 | 15 | ENV | 351 | PTVWLSVIWM | 447 | 10 | | | | | |
| 95 | 19 | X | 59 | PVCAFSSA | 448 | 8 | | | | | |
| 85 | 17 | POL | 612 | PVNRPIDWKV | 449 | 10 | 0.0002 | | | | |
| 95 | 19 | POL | 654 | QAFTFSPT | 450 | 8 | | | | | |
| 95 | 19 | POL | 654 | QAFTFSPTYKA | 451 | 11 | | | | | |
| 95 | 19 | ENV | 179 | QAGFFLLT | 452 | 8 | | | | | |
| 80 | 16 | ENV | 179 | QAGFFLLTRI | 453 | 10 | | | | | |
| 80 | 16 | ENV | 179 | QAGFFLLTRIL | 454 | 11 | | | | | |
| 90 | 18 | NUC | 57 | QAILCWGEL | 455 | 9 | | | | | |
| 90 | 18 | NUC | 57 | QAILCWGELM | 456 | 10 | | | | | |
| 95 | 19 | ENV | 107 | QAMQWNST | 457 | 8 | | | | | |
| 80 | 16 | ENV | 107 | QAMQWNSTT | 458 | 9 | | | | | |
| 80 | 16 | NUC | 18 | QASKLCLGWL | 459 | 10 | | | | | |
| 80 | 16 | X | 8 | QLDPARDV | 460 | 8 | 0.0001 | | | | |
| 80 | 16 | X | 8 | QLDPARDVL | 461 | 9 | 0.0001 | | | | |
| 80 | 16 | X | 8 | QLDPARDVLCL | 462 | 11 | 0.0001 | | | | |
| 90 | 18 | NUC | 99 | QLLWFHISCL | 463 | 10 | 0.0060 | | | | |
| 85 | 17 | NUC | 99 | QLLWFHISCLT | 464 | 11 | | | | | |
| 95 | 19 | POL | 685 | QVFADATPT | 465 | 9 | 0.0001 | | | | |
| 95 | 19 | POL | 528 | RAFPHCLA | 466 | 8 | | | | | |
| 80 | 16 | ENV | 187 | RILTIPQSL | 467 | 9 | 0.0010 | | | | |
| 90 | 18 | POL | 624 | RIVGLLGFA | 468 | 9 | | | | | |
| 90 | 18 | POL | 624 | RIVGLLGFAA | 469 | 10 | | | | | |
| 75 | 15 | POL | 106 | RLKLIMPA | 470 | 8 | | | | | |
| 90 | 18 | NUC | 56 | RQAILCWGEL | 471 | 10 | | | | | |
| 90 | 18 | NUC | 56 | RQAILCWGELM | 472 | 11 | | | | | |
| 90 | 18 | NUC | 98 | RQLLWFHI | 473 | 8 | | | | | |
| 90 | 18 | NUC | 98 | RQLLWFHISCL | 474 | 11 | | | | | |
| 85 | 17 | ENV | 88 | RQSGRQPT | 475 | 8 | | | | | |
| 90 | 18 | POL | 353 | RTPARVTGGV | 476 | 10 | | | | | |
| 95 | 19 | NUC | 127 | RTPPAYRPPNA | 477 | 11 | | | | | |
| 95 | 19 | POL | 36 | RVAEDLNL | 478 | 8 | | | | | |
| 90 | 18 | POL | 36 | RVAEDLNLGNL | 479 | 11 | | | | | |
| 80 | 16 | POL | 818 | RVHFASPL | 480 | 8 | | | | | |
| 75 | 15 | POL | 818 | RVHFASPLHV | 481 | 10 | 0.0001 | | | | |
| 75 | 15 | POL | 818 | RVHFASPLHVA | 482 | 11 | | | | | |
| 100 | 20 | POL | 357 | RVTGGVFL | 483 | 8 | | | | | |
| 100 | 20 | POL | 357 | RVTGGVFLV | 484 | 9 | 0.0041 | | | | |
| 90 | 18 | X | 65 | SAGPCALRFT | 485 | 10 | | | | | |
| 95 | 19 | POL | 520 | SAICSVVRRA | 486 | 10 | 0.0001 | | | | |
| 90 | 18 | NUC | 35 | SALYREAL | 487 | 8 | | | | | |
| 100 | 20 | POL | 49 | SIPWTHKV | 488 | 8 | | | | | |
| 95 | 19 | ENV | 194 | SLDSWWTSL | 489 | 9 | | | | | |
| 75 | 15 | POL | 565 | SLGIHLNPNKT | 490 | 11 | | | | | |
| 95 | 19 | ENV | 337 | SLLVPFVQWFV | 491 | 11 | | | | | |
| 75 | 15 | POL | 581 | SLNFMGYV | 492 | 8 | | | | | |
| 75 | 15 | POL | 581 | SLNFMGYVI | 493 | 9 | 0.0038 | | | | |
| 95 | 19 | X | 54 | SLRGLPVCA | 494 | 9 | 0.0007 | | | | |
| 90 | 18 | POL | 403 | SLTNLLSSNL | 495 | 10 | 0.0014 | | | | |
| 75 | 15 | ENV | 216 | SQSPTSNHSPT | 496 | 11 | | | | | |
| 75 | 15 | ENV | 280 | STGPCKTCT | 497 | 9 | | | | | |
| 100 | 20 | NUC | 141 | STLPETTV | 498 | 8 | | | | | |
| 100 | 20 | NUC | 141 | STLPETTVV | 499 | 9 | 0.0019 | | | | |
| 80 | 16 | ENV | 85 | STNRQSGRQPT | 500 | 11 | | | | | |
| 85 | 17 | POL | 548 | SVQHLESL | 501 | 8 | | | | | |
| 80 | 16 | ENV | 330 | SVRFSWLSL | 502 | 9 | 0.0001 | | | | |
| 80 | 16 | ENV | 330 | SVRFSWLSLL | 503 | 10 | 0.0004 | | | | |
| 80 | 16 | ENV | 330 | SVRFSWLSLLV | 504 | 11 | | | | | |
| 90 | 18 | POL | 739 | SVVLSRKYT | 505 | 9 | | | | | |
| 95 | 19 | POL | 524 | SVVRRAFPHCL | 506 | 11 | | | | | |
| 85 | 17 | POL | 716 | TAELLAACFA | 507 | 10 | | | | | |
| 95 | 19 | NUC | 53 | TALRQAIL | 508 | 8 | | | | | |
| 80 | 16 | NUC | 33 | TASALYREA | 509 | 9 | | | | | |
| 80 | 16 | NUC | 33 | TASALYREAL | 510 | 10 | | | | | |
| 90 | 18 | ENV | 190 | TIPQSLDSWWT | 511 | 11 | | | | | |
| 100 | 20 | NUC | 142 | TLPETTVV | 512 | 8 | | | | | |
| 100 | 20 | POL | 150 | TLWKAGIL | 513 | 8 | | | | | |
| 95 | 19 | POL | 636 | TQCGYPAL | 514 | 8 | | | | | |
| 95 | 19 | POL | 636 | TQCGYPALM | 515 | 9 | | | | | |
| 95 | 19 | POL | 836 | TQCGYPALMPL | 516 | 11 | | | | | |
| 85 | 17 | POL | 798 | TTGRTSLYA | 517 | 9 | | | | | |
| 75 | 15 | ENV | 278 | TTSTGPCKT | 518 | 9 | | | | | |
| 75 | 15 | ENV | 278 | TTSTGPCKTCT | 519 | 11 | | | | | |
| 85 | 17 | POL | 100 | TVNEKRRL | 520 | 8 | | | | | |
| 80 | 16 | NUC | 16 | TVQASKLCL | 521 | 9 | 0.0002 | | | | |
| 75 | 15 | ENV | 352 | TVWLSVIWM | 522 | 9 | 0.0002 | | | | |
| 95 | 19 | POL | 37 | VAEDLNLGNL | 523 | 10 | 0.0001 | | | | |
| 95 | 19 | X | 15 | VLCLRPVGA | 524 | 9 | 0.0014 | | | | |
| 85 | 17 | POL | 543 | VLGAKSVQHL | 525 | 10 | 0.0001 | | | | |
| 90 | 18 | X | 133 | VLGGCRHKL | 526 | 9 | 0.0009 | | | | |
| 90 | 18 | X | 133 | VLGGCRHKLV | 527 | 10 | 0.0001 | | | | |
| 85 | 17 | X | 92 | VLHKRTLGL | 528 | 9 | 0.0012 | | | | |
| 95 | 19 | ENV | 259 | VLLDYQGM | 529 | 8 | | | | | |
| 95 | 19 | ENV | 259 | VLLDYQGML | 530 | 9 | 0.0440 | 0.0001 | 0.0210 | 0.9000 | 0.0002 |
| 90 | 18 | ENV | 259 | VLLDYQGMLPV | 531 | 11 | 0.5800 | 0.2200 | 4.9000 | 0.3400 | 0.0170 |
| 95 | 19 | ENV | 177 | VLQAGFFL | 532 | 8 | 0.0019 | | | | |
| 95 | 19 | ENV | 177 | VLQAGFFLL | 533 | 9 | 0.0660 | | | | |
| 95 | 19 | ENV | 177 | VLQAGFFLLT | 534 | 10 | 0.0011 | | | | |
| 80 | 16 | NUC | 17 | VQASKLCL | 535 | 8 | | | | | |
| 80 | 16 | NUC | 17 | VQASKLCLGWL | 536 | 11 | | | | | |
| 95 | 19 | ENV | 343 | VQWFVGLSPT | 537 | | | | | | |
| 95 | 19 | ENV | 343 | VQWFVGLSPTV | 538 | 11 | | | | | |
| 100 | 20 | POL | 358 | VTGGVFLV | 539 | 8 | | | | | |
| 90 | 18 | POL | 542 | VVLGAKSV | 540 | 8 | | | | | |
| 80 | 16 | POL | 542 | VVLGAKSVQHL | 541 | 11 | | | | | |
| 90 | 18 | POL | 740 | VVLSRKYT | 542 | 8 | | | | | |
| 95 | 19 | POL | 525 | VVARAFPHCL | 543 | 10 | 0.0003 | | | | |
| 95 | 19 | POL | 525 | VVRRAFPHCIA | 544 | 11 | | | | | |
| 80 | 16 | POL | 759 | WILRGTSFV | 545 | 9 | 0.0270 | | | | |
| 80 | 18 | POL | 759 | WILRGTSFVYV | 546 | 11 | | | | | |
| 80 | 16 | POL | 751 | WLLGCAANWI | 547 | 10 | 0.0053 | | | | |
| 80 | 16 | POL | 751 | WLLGCAANWIL | 548 | 11 | | | | | |
| 100 | 20 | POL | 414 | WLSLDVSA | 549 | 8 | | | | | |
| 95 | 19 | POL | 414 | WLSLDVSAA | 550 | 9 | 0.0059 | | | | |
| 100 | 20 | ENV | 335 | WLSLLVPFV | 551 | 9 | 1.1000 | 0.0380 | 7.2000 | 0.3600 | 0.0310 |
| 95 | 19 | ENV | 237 | WMCLRRFI | 552 | 8 | | | | | |
| 95 | 19 | ENV | 237 | WMCLRRFII | 553 | 9 | 0.0005 | | | | |
| 95 | 19 | ENV | 237 | WMCLRRFIIFL | 554 | 11 | 0.0019 | | | | |
| 85 | 17 | ENV | 359 | WMMWYWGPSL | 555 | 10 | 0.0009 | | | | |
| 100 | 20 | POL | 52 | WTHKVGNFT | 556 | 9 | 0.0001 | | | | |
| 95 | 19 | POL | 52 | WTHKVGNFTGL | 557 | 11 | | | | | |
| 100 | 20 | POL | 147 | YLHTLWKA | 558 | 8 | | | | | |
| 100 | 20 | POL | 147 | YLHTLWKAGI | 559 | 10 | 0.0160 | 0.0005 | 0.5600 | 0.1000 | 0.0320 |
| 100 | 20 | POL | 147 | YLHTLWKAGIL | 560 | 11 | | | | | |
| 100 | 20 | POL | 122 | YLPDKGI | 561 | 8 | | | | | |
| 90 | 18 | NUC | 118 | YLVSFGVWI | 562 | 9 | 0.3800 | | | | |
| 90 | 18 | NUC | 118 | YLVSFGVWIRT | 563 | 11 | | | | | |
| 90 | 18 | POL | 538 | YMDDVVLGA | 564 | 9 | 0.0250 | 0.0001 | 0.0024 | 0.1000 | 0.0002 |
| 90 | 18 | ENV | 263 | YQGMLPVCPL | 565 | 10 | | | | | |
| 75 | 15 | POL | 5 | YQHFRKLL | 566 | 8 | | | | | |
| 75 | 15 | POL | 5 | YQHFRKLLL | 567 | 9 | | | | | |
| 75 | 15 | POL | 5 | YQHFRKLLLL | 568 | 10 | | | | | |
| 85 | 17 | POL | 746 | YTSFPWLL | 569 | 8 | | | | | |
| 75 | 15 | POL | 746 | YTSFPWLLGCA | 570 | 11 | | | | | |
| 90 | 18 | POL | 768 | YVPSALNPA | 571 | 9 | 0.0039 | | | | |

[0425] TABLE IX

HBV A03 SUPER MOTIF (With binding information)

| | | | | | | | | | | | | | |
|---|---|---|---|---|---|---|---|---|---|---|---|---|---|
| | | Pro- | | | | C- | | | | | | | SEQ ID |
| Conservancy | Frequency | tein | Position | Sequence | P2 | term | AA | A*0301 | A*1101 | A*3101 | A*3301 | A*6801 | NO: |

| | | | | | | | | | | | | | |
|---|---|---|---|---|---|---|---|---|---|---|---|---|---|
| 85 | 17 | POL | 721 | AACFARSR | A | R | 8 | 0.0004 | 0.0003 | 0.0058 | 0.0035 | 0.0014 | 572 |
| 95 | 19 | POL | 521 | AICSVVRA | I | R | 8 | −0.0002 | 0.0003 | 0.0014 | −0.0009 | 0.0006 | 573 |
| 90 | 18 | POL | 772 | ALNPADDPSR | L | R | 10 | 0.0003 | 0.0001 | | | | 574 |
| 85 | 17 | X | 70 | ALRFTSAR | L | R | 8 | 0.0047 | 0.0009 | 0.0450 | 0.0230 | 0.0004 | 575 |
| 80 | 16 | POL | 822 | ASPLHVAWR | S | R | 9 | | | | | | 576 |
| 75 | 15 | ENV | 84 | ASTNRQSGR | S | R | 9 | 0.0009 | 0.0002 | 0.0088 | 0.0008 | 0.0001 | 577 |
| 80 | 16 | POL | 755 | CAANWILR | A | R | 8 | | | | | | 578 |
| 85 | 17 | X | 69 | CALRFTSAR | A | R | 9 | 0.0034 | 0.0230 | 1.5000 | 8.0000 | 0.7300 | 579 |
| 90 | 18 | X | 17 | CLRPVGAESR | L | R | 10 | 0.0011 | 0.0001 | | | | 580 |
| 100 | 20 | NUC | 48 | CSPHHTALR | S | R | 9 | 0.0029 | 0.0001 | 0.0520 | 0.0250 | 0.0440 | 581 |
| 85 | 17 | NUC | 29 | DLLDTASALYR | L | R | 11 | 0.0042 | −0.0003 | −0.0012 | 3.7000 | 0.0410 | 582 |
| 85 | 17 | NUC | 32 | DTASALYR | T | R | 8 | 0.0004 | −0.0002 | −0.0009 | 0.0018 | 0.0009 | 583 |
| 95 | 19 | POL | 17 | EAGPLEEELPR | A | R | 11 | −0.0009 | −0.0003 | −0.0012 | 0.0015 | 0.0110 | 584 |
| 90 | 18 | POL | 718 | ELLAACFAR | L | R | 9 | 0.0002 | 0.0004 | | | | 585 |
| 85 | 17 | POL | 718 | ELLAACFARSR | L | R | 11 | 0.0062 | 0.0018 | 0.0200 | 0.2000 | 0.1600 | 586 |
| 95 | 19 | NUC | 174 | ETTVVRRR | T | R | 8 | 0.0003 | −0.0002 | −0.0009 | 0.1400 | 0.0027 | 587 |
| 80 | 16 | NUC | 174 | ETTVVRRRGR | T | R | 10 | 0.0003 | 0.0001 | | | | 588 |
| 80 | 16 | POL | 821 | FASPLHVAWR | A | R | 10 | | | | | | 589 |
| 90 | 18 | X | 63 | FSSAGPCALR | S | R | 10 | | | | | | 590 |
| 95 | 19 | POL | 656 | FTFSPTYK | T | K | 8 | 0.0100 | 0.0100 | 0.0023 | 0.2100 | 0.0590 | 591 |
| 95 | 19 | POL | 518 | FTSAICSVVR | T | R | 10 | 0.0003 | 0.0003 | | | | 592 |
| 95 | 19 | POL | 518 | FTSAICSVVRR | T | R | 11 | 0.0065 | 0.0092 | 0.0170 | 0.0350 | 1.5000 | 593 |
| 90 | 18 | X | 132 | FVLGGCRHK | V | K | 9 | 0.0430 | 0.0090 | | | | 594 |
| 75 | 15 | POL | 567 | GHLNPNK | I | K | 8 | | | | | | 595 |
| 75 | 15 | POL | 567 | GIHLNPNKTK | I | K | 10 | 0.0025 | 0.0011 | 0.0009 | 0.0009 | 0.0003 | 596 |
| 75 | 15 | POL | 567 | GIHLNPNKTKR | I | R | 11 | | | | | | 597 |
| 85 | 17 | NUC | 29 | GMDIDPYK | M | K | 8 | 0.0008 | 0.0004 | −0.0009 | −0.0009 | 0.0001 | 598 |
| 90 | 18- | POL | 735 | GTDNSVVLSR | T | R | 10 | 0.0010 | 0.0420 | 0.0030 | 0.0019 | 0.0008 | 599 |
| 90 | 18 | POL | 735 | GTDNSVVLSRK | T | K | 11 | 0.0140 | 0.5600 | −0.0002 | −0.0006 | 0.0001 | 600 |
| 95 | 19 | NUC | 123 | GVWIRTPPAYR | V | R | 11 | 0.1900 | 0.1700 | 6.8000 | 0.7300 | 0.6600 | 601 |
| 90 | 18 | NUC | 104 | HISCLTFGR | I | R | 9 | 0.0160 | 0.0065 | | | | 602 |
| 75 | 15 | POL | 569 | HLNPNKTK | L | K | 8 | | | | | | 603 |
| 75 | 15 | POL | 569 | HLNPNKTKR | L | R | 9 | 0.0025 | 0.0001 | | | | 604 |
| 100 | 20 | POL | 149 | HTLWKAGILYK | T | K | 11 | 0.5400 | 0.4400 | 0.0370 | 0.0720 | 0.1900 | 605 |
| 90 | 18 | NUC | 105 | ISCLTFGR | S | R | 8 | 0.0004 | 0.0002 | 0.0017 | −0.0009 | 0.0017 | 606 |
| 100 | 20 | POL | 153 | KAGILYKA | A | R | 8 | 0.0002 | −0.0002 | 0.0015 | −0.0009 | 0.0001 | 607 |
| 80 | 16 | POL | 810 | KLPVNRPIDWK | L | K | 11 | | | | | | 608 |
| 75 | 15 | X | 130 | KVFVLGGCR | V | R | 9 | 0.0420 | 0.0820 | 0.6000 | 0.0710 | 0.0030 | 609 |
| 85 | 17 | POL | 720 | LAACFARSR | A | R | 9 | 0.0058 | 0.0065 | | | | 610 |
| 90 | 18 | POL | 719 | LLAACFAR | L | R | 8 | 0.0024 | 0.0003 | 0.0015 | 0.0029 | 0.0064 | 611 |
| 85 | 17 | POL | 719 | LLAACFARSR | L | R | 10 | | | | | | 612 |
| 85 | 17 | NUC | 30 | LLDTASALYR | L | R | 10 | 0.0050 | 0.0002 | | | | 613 |
| 80 | 16 | POL | 752 | LLGCAANWILR | L | R | 11 | | | | | | 614 |
| 75 | 15 | POL | 564 | LSLGIHLNPNK | S | K | 11 | | | | | | 615 |
| 95 | 19 | NUC | 169 | LSTLPETTVVR | S | R | 11 | −0.0009 | 0.0008 | −0.0012 | −0.0023 | 0.0078 | 616 |
| 75 | 15 | POL | 3 | LSYQHFRK | S | K | 8 | | | | | | 617 |
| 85 | 17 | POL | 99 | LTVNEKRR | T | R | 8 | −0.0002 | −0.0002 | −0.0009 | −0.0009 | 0.0001 | 618 |
| 90 | 18 | NUC | 119 | LVSFGVWIR | V | R | 9 | 0.0028 | 0.0120 | | | | 619 |
| 100 | 20 | POL | 377 | LVVDFSQFSR | V | R | 10 | 0.0016 | 0.3600 | 0.0260 | 0.2300 | 0.4900 | 620 |
| 75 | 15 | X | 103 | MSTTDLEAYFK | S | K | 11 | | | | | | 621 |
| 90 | 18 | NUC | 75 | NLEDPASR | L | A | 8 | −0.0002 | −0.0002 | −0.0009 | −0.0009 | 0.0001 | 622 |
| 95 | 19 | POL | 45 | NLNVSIPWTHK | L | K | 11 | −0.0009 | 0.0005 | −0.0012 | −0.0023 | 0.0019 | 623 |
| 90 | 18 | POL | 738 | NSVVLSRK | S | K | 8 | 0.0006 | 0.0010 | −0.0009 | −0.0009 | 0.0007 | 624 |
| 100 | 20 | POL | 47 | NVSIPWTHK | V | K | 9 | 0.0820 | 0.0570 | 0.0002 | 0.0100 | 0.0320 | 625 |
| 90 | 18 | POL | 775 | PADDPSRGR | A | R | 9 | 0.0008 | 0.0002 | 0.0004 | 0.0015 | 0.0002 | 626 |
| 80 | 16 | X | 11 | PARDVLCLR | A | R | 9 | 0.0002 | 0.0002 | 0.0100 | 0.0180 | 0.0002 | 627 |
| 75 | 15 | ENV | 83 | PASTNRQSGR | A | R | 10 | | | | | | 628 |
| 90 | 18 | POL | 616 | PIDWKCQR | I | R | 9 | 0.0002 | 0.0005 | | | | 629 |
| 80 | 18 | POL | 496 | PILGFRK | I | K | 8 | | | | | | 630 |
| 95 | 19 | POL | 20 | PLEEELPR | L | R | 8 | 0.0002 | −0.0002 | −0.0009 | −0.0009 | 0.0001 | 631 |
| 100 | 20 | POL | 2 | PLSYQHFR | L | R | 8 | −0.0002 | −0.0002 | −0.0009 | −0.0009 | 0.0001 | 632 |
| 75 | 15 | POL | 2 | PLSYQHFRK | L | K | 9 | 0.0011 | 0.0031 | 0.0006 | 0.0008 | 0.0002 | 633 |
| 85 | 17 | POL | 98 | PLTVNEKR | L | R | 8 | 0.0002 | −0.0002 | −0.0009 | −0.0009 | 0.0001 | 634 |
| 85 | 17 | POL | 98 | PLTVNEKRR | L | R | 9 | 0.0008 | 0.0005 | 0.0004 | 0.0027 | 0.0002 | 635 |
| 90 | 18 | X | 20 | PVGAESRGR | V | R | 9 | 0.0002 | 0.0005 | 0.0004 | 0.0043 | 0.0002 | 636 |
| 85 | 17 | POL | 612 | PVNRPIDWK | V | K | 9 | 0.0310 | 0.1400 | 0.0002 | 0.0006 | 0.0009 | 637 |
| 95 | 19 | POL | 654 | QAFTFSPTYK | A | K | 10 | 0.0450 | 0.5400 | 0.0010 | 0.0057 | 1.2000 | 638 |
| 80 | 16 | ENV | 179 | QAGFFLLTR | A | R | 9 | | | | | | 639 |
| 75 | 15 | NUC | 169 | QSPRRRRSQSR | S | R | 11 | | | | | | 640 |
| 80 | 16 | POL | 189 | QSSGILSR | S | R | 8 | | | | | | 641 |
| 75 | 15 | POL | 106 | FILKLIMPAR | L | R | 9 | 0.0950 | 0.0002 | 3.1000 | 0.0490 | 0.0002 | 642 |
| 75 | 15 | X | 128 | RLKVFVLGGCR | L | R | 11 | | | | | | 643 |
| 95 | 19 | POL | 376 | RLVVDFSQFSR | L | R | 11 | 0.2800 | 3.8000 | 2.6000 | 1.2000 | 8.1000 | 644 |
| 95 | 19 | NUC | 183 | RSPRRRTPSPR | S | R | 11 | −0.0007 | −0.0003 | 0.0190 | −0.0023 | 0.0003 | 645 |
| 75 | 15 | NUC | 167 | RSQSPRRR | S | R | 8 | | | | | | 646 |
| 75 | 15 | NUC | 167 | RSQSPRRRR | S | R | 9 | | | | | | 647 |
| 95 | 19 | NUC | 188 | ATPSPRRR | T | R | 8 | −0.0002 | −0.0002 | 0.0033 | 0.0014 | 0.0002 | 648 |
| 95 | 19 | NUC | 188 | RTPSPRRRR | T | R | 9 | 0.0054 | 0.0005 | 0.2000 | 0.0016 | 0.0003 | 649 |
| 100 | 20 | POL | 357 | RVTGGVFLVDK | V | K | 11 | 0.0190 | 0.0290 | −0.0002 | −0.0003 | 0.0001 | 650 |
| 90 | 18 | X | 65 | SAGPCALR | A | R | 8 | −0.0002 | 0.0020 | 0.0029 | 0.0024 | 0.0360 | 651 |
| 95 | 19 | POL | 520 | SAICSVVR | A | R | 8 | .0.0002 | 0.0071 | 0.0280 | 0.0081 | 0.0690 | 652 |
| 95 | 19 | POL | 520 | SAICSVVRR | A | R | 9 | 0.0058 | 0.2100 | 0.1500 | 0.0650 | 0.3800 | 653 |
| 90 | 18 | POL | 771 | SALNPADDPSR | A | R | 11 | −0.0004 | −0.0003 | −0.0012 | −0.0023 | 0.0003 | 654 |
| 75 | 15 | POL | 565 | SLGIHLNPNK | L | K | 10 | | | | | | 655 |
| 90 | 18 | X | 64 | SSAGPCALR | S | R | 9 | 0.0080 | 0.1400 | 0.3300 | 0.1600 | 0.7500 | 656 |
| 95 | 19 | NUC | 170 | STLPETTVVR | T | R | 10 | 0.0007 | 0.0600 | 0.0080 | 0.0240 | 0.0250 | 657 |
| 95 | 19 | NUC | 170 | STLPETTVVRR | T | R | 11 | 0.0150 | 1.4000 | 0.1000 | 0.1600 | 0.3100 | 658 |
| 80 | 16 | ENV | 85 | STNQSGR | T | R | 8 | | | | | | 659 |
| 75 | 15 | X | 104 | STTDLEAYFK | T | K | 10 | 0.0066 | 2.7000 | | | | 660 |
| 85 | 17 | POL | 716 | TAELLAACFAR | A | R | 11 | 0.0006 | 0.0023 | 0.0066 | 0.1600 | 0.0590 | 661 |
| 95 | 19 | NUC | 171 | TLPETTVVR | L | R | 9 | 0.0008 | 0.0002 | 0.0009 | 0.0024 | 0.0180 | 662 |
| 95 | 19 | NUC | 171 | TLPETTVVRR | L | R | 10 | 0.0007 | 0.0230 | 0.0006 | 0.0120 | 0.0440 | 663 |
| 95 | 19 | NUC | 171 | TLPETTVVRRR | L | R | 11 | 0.0005 | 0.0160 | 0.0061 | 0.0710 | 0.6400 | 664 |
| 100 | 20 | POL | 150 | TLWKAGILYK | L | K | 10 | 5.3000 | 0.3800 | 0.0051 | 0.0010 | 0.0130 | 665 |
| 100 | 20 | POL | 150 | TLWKAGILYKR | L | R | 11 | 0.0082 | 0.0095 | 0.1000 | 0.1100 | 0.0640 | 666 |
| 95 | 19 | POL | 519 | TSAICSVVR | S | R | 9 | 0.0005 | 0.0008 | 0.0600 | 0.0200 | 0.0820 | 667 |
| 95 | 19 | POL | 519 | TSAICSVVRR | S | R | 10 | 0.0018 | 0.0008 | 0.0030 | 0.0066 | 0.0048 | 668 |
| 75 | 15 | X | 105 | TTDLEAYFK | T | K | 9 | 0.0006 | 0.9200 | 0.0006 | 0.0012 | 0.0170 | 669 |
| 75 | 15 | ENV | 278 | TTSTGPCK | T | K | 8 | | | | | | 670 |
| 80 | 16 | NUC | 175 | TTVVRRRGR | T | R | 9 | 0.0008 | 0.0005 | 0.2500 | 0.1400 | 0.0095 | 671 |
| 80 | 16 | NUC | 176 | TVVRRRGR | V | R | 8 | 0.0003 | 0.0001 | | | | 672 |
| 80 | 16 | NUC | 176 | TVVRRRGRSPR | V | R | 11 | | | | | | 673 |
| 90 | 18 | X | 133 | VLGGCRHK | L | K | 8 | 0.0150 | 0.0002 | −0.0005 | −0.0009 | 0.0001 | 674 |
| 80 | 16 | ENV | 177 | VLQAGFFLLTR | I | R | 11 | | | | | | 675 |
| 90 | 18 | NUC | 120 | VSFGVWIR | S | R | 8 | 0.0040 | 0.0290 | 0.0750 | 0.0270 | 0.0360 | 676 |
| 100 | 20 | POL | 48 | VSIPWTHK | S | K | 8 | 0.0130 | 0.0170 | 0.0031 | 0.0013 | 0.0004 | 677 |
| 100 | 20 | POL | 358 | VTGGVFLVDK | T | K | 10 | 0.0390 | 0.0920 | 0.0002 | 0.0006 | 0.0022 | 678 |
| 100 | 20 | POL | 378 | WDFSQFSR | V | R | 9 | 0.0015 | 0.0750 | 0.0013 | 0.0170 | 0.0330 | 679 |
| 80 | 16 | NUC | 177 | WRRRGRSPR | V | R | 10 | 0.0027 | 0.0001 | | | | 680 |
| 80 | 16 | NUC | 177 | WRRRGRSPRR | V | R | 11 | | | | | | 681 |
| 95 | 19 | NUC | 125 | WIRTPPAYR | I | R | 9 | 0.0008 | 0.0005 | | | | 682 |
| 90 | 18 | POL | 314 | WLQFRNSK | L | K | 8 | −0.0002 | 0.0005 | 0.0020 | 0.0052 | 0.0001 | 683 |
| 85 | 17 | NUC | 28 | WLWGMDIDPYK | L | K | 11 | 0.0030 | 0.0013 | −0.0003 | 0.0039 | 0.0490 | 684 |
| 100 | 20 | POL | 122 | YLPLDKGIK | L | K | 9 | 0.0001 | 0.0001 | 0.0006 | 0.0006 | 0.0002 | 685 |
| 90 | 18 | NUC | 118 | YLVSFGVWIR | L | R | 10 | 0.0005 | 0.0002 | | | | 686 |
| 90 | 18 | POL | 538 | YMDDVVLGAK | M | K | 10 | 0.0330 | 0.0043 | 0.0002 | 0.0006 | 0.0001 | 687 |
| 80 | 16 | POL | 493 | YSHPIILGFR | S | R | 10 | | | | | | 688 |
| 80 | 16 | POL | 493 | YSHPIILGFRK | S | K | 11 | | | | | | 689 |

[0426] TABLE X

HBV A24 SUPER MOTIF (With binding information)

| | | | | | | | |
|---|---|---|---|---|---|---|---|
| Conservancy | Freq | Protein | Position | Sequence | String | A*2401 | SEQ ID NO: |

| | | | | | | | |
|---|---|---|---|---|---|---|---|
| 95 | 19 | POL | 529 | AFPHCLAF | XFXXXXXF | | 690 |
| 95 | 19 | POL | 529 | AFPHCLAFSY | XFXXXXXXXY | | 691 |
| 95 | 19 | POL | 529 | AFPHCLAFSYM | XFXXXXXXXM | | 692 |
| 95 | 19 | X | 62 | AFSSAGPCAL | XFXXXXXXXL | 0.0012 | 693 |
| 90 | 18 | POL | 535 | AFSYMDDVVL | XFXXXXXXXL | 0.0009 | 694 |
| 95 | 19 | POL | 655 | AFTFSPTY | XFXXXXXY | | 695 |
| 95 | 19 | POL | 655 | AFTFSPTYKAF | XFXXXXXXXXF | | 696 |
| 95 | 19 | POL | 521 | AICSVVRRAF | XIXXXXXXXF | | 697 |
| 90 | 18 | NUC | 58 | AILCWGEL | XIXXXXXL | | 698 |
| 90 | 18 | NUC | 58 | AILCWGELM | XIXXXXXXM | | 699 |
| 95 | 19 | POL | 642 | ALMPLYACI | XLXXXXXXI | | 700 |
| 95 | 19 | NUC | 54 | ALRQAILCW | XLXXXXXXW | | 701 |
| 80 | 16 | ENV | 108 | AMQWNSTTF | XMXXXXXXF | | 702 |
| 95 | 19 | POL | 690 | ATPTGWGL | XTXXXXXL | | 703 |
| 75 | 15 | POL | 690 | ATPTGWGLAI | XTXXXXXXXI | | 704 |
| 95 | 19 | POL | 397 | AVPNLQSL | XVXXXXXL | | 705 |
| 95 | 19 | POL | 397 | AVPNLQSLTNL | XVXXXXXXXXL | | 706 |
| 100 | 20 | NUC | 131 | AYRPPNAPI | XYXXXXXXI | 0.0260 | 707 |
| 100 | 20 | NUC | 131 | AYRPPNAPIL | XYXXXXXXXL | 0.0220 | 708 |
| 75 | 15 | POL | 607 | CFRKLPVNRPI | XFXXXXXXXXI | | 709 |
| 100 | 20 | ENV | 312 | CIPIPSSW | XIXXXXXW | | 710 |
| 100 | 20 | ENV | 312 | CIPIPSSWAF | XIXXXXXXXF | | 711 |
| 85 | 17 | NUC | 23 | CLGWLWGM | XLXXXXXM | | 712 |
| 85 | 17 | NUC | 23 | CLGWLWGMDI | XLXXXXXXI | | 713 |
| 100 | 20 | ENV | 253 | CLIFLLVL | XLXXXXXL | | 714 |
| 100 | 20 | ENV | 253 | CLIFLLVLL | XLXXXXXXL | | 715 |
| 95 | 19 | ENV | 253 | CLIFLLVLLDY | XLXXXXXXXXY | | 716 |
| 95 | 19 | ENV | 239 | CLRRFIIF | XLXXXXXF | | 717 |
| 95 | 19 | ENV | 239 | CLRRFIIFL | XLXXXXXXL | | 718 |
| 75 | 15 | ENV | 239 | CLRRFIIFLF | XLXXXXXXXF | | 719 |
| 75 | 15 | ENV | 239 | CLRRFIIFLFI | XLXXXXXXXI | | 720 |
| 100 | 20 | ENV | 310 | CTCIPIPSSW | XTXXXXXXXW | | 721 |
| 90 | 18 | NUC | 31 | DIDPYKEF | XIXXXXXF | | 722 |
| 85 | 17 | NUC | 29 | DLLDTASAL | XLXXXXXXL | | 723 |
| 85 | 17 | NUC | 29 | DLLDTASALY | XLXXXXXXXY | | 724 |
| 95 | 19 | POL | 40 | DLNLGNLNVSI | XLXXXXXXXXI | | 725 |
| 80 | 16 | NUC | 32 | DTASALYREAL | XTXXXXXXXXL | | 726 |
| 85 | 17 | POL | 618 | DWKCQRI | XWXXXXXI | | 727 |
| 85 | 17 | POL | 618 | DWKVCQRIVGL | XWXXXXXXXXL | | 728 |
| 90 | 18 | ENV | 262 | DYQGMLPVCPL | XYXXXXXXXXL | 0.0002 | 729 |
| 80 | 16 | X | 122 | ELGEEIRL | XLXXXXXL | | 730 |
| 95 | 19 | NUC | 43 | ELLSFLPSDF | XIXXXXXXXF | | 731 |
| 95 | 19 | NUC | 43 | ELLSFLPSDPP | XLXXXXXXXXF | | 732 |
| 90 | 18 | NUC | 117 | EYLVSRGVW | XYXXXXXXW | | 733 |
| 90 | 18 | NUC | 117 | EYLVSFGVWI | XYXXXXXXXI | 0.0340 | 734 |
| 100 | 20 | ENV | 382 | FFCLWVYI | XFXXXXXI | | 735 |
| 80 | 16 | ENV | 182 | FFLLTRIL | XFXXXXXL | | 736 |
| 80 | 16 | ENV | 182 | FFLLTRILTI | XFXXXXXXXI | | 737 |
| 85 | 17 | ENV | 13 | FFPDHQLDPAF | XFXXXXXXXXF | | 738 |
| 80 | 16 | ENV | 243 | FIIFLFIL | XIXXXXXL | | 739 |
| 80 | 16 | ENV | 243 | FIIFLFILL | XIXXXXXXL | | 740 |
| 80 | 16 | ENV | 243 | FIIFLFILLL | XIXXXXXXXL | | 741 |
| 80 | 16 | ENV | 248 | FILLLCLI | XIXXXXXI | | 742 |
| 60 | 16 | ENV | 248 | FILLLCLIF | XIXXXXXXF | | 743 |
| 80 | 16 | ENV | 248 | FILLLCLIFL | XIXXXXXXXL | | 744 |
| 80 | 16 | ENV | 248 | FILLLCLIFLL | XIXXXXXXXXL | | 745 |
| 80 | 16 | ENV | 246 | FLFILLLCL | XLXXXXXXL | | 746 |
| 80 | 16 | ENV | 246 | FLFILLLCLI | XLXXXXXXXI | | 747 |
| 80 | 16 | ENV | 246 | FLFILLLCLIF | XLXXXXXXXXF | | 748 |
| 75 | 15 | ENV | 171 | FLGPLLVL | XLXXXXXL | | 749 |
| 95 | 19 | POL | 513 | FLLAQFTSAI | XLXXXXXXXI | | 750 |
| 95 | 19 | POL | 562 | FLLSLGIHL | XLXXXXXXL | | 751 |
| 80 | 16 | ENV | 183 | FLLTRILTI | XLXXXXXXI | | 752 |
| 95 | 19 | ENV | 256 | FLLVLLDY | XLXXXXXY | | 753 |
| 95 | 19 | ENV | 256 | FLLVLLDYQGM | XLXXXXXXXXM | | 754 |
| 95 | 19 | POL | 656 | FTFSPTYKAF | XTXXXXXXXF | | 755 |
| 95 | 19 | POL | 656 | FTFSPTYKAFL | XTXXXXXXXXL | | 756 |
| 95 | 19 | POL | 635 | FTQCGYPAL | XTXXXXXXL | | 757 |
| 95 | 19 | POL | 635 | FTQCGYPALM | XTXXXXXXXM | | 758 |
| 95 | 19 | ENV | 346 | FVGLSPTVW | XVXXXXXXW | | 759 |
| 95 | 19 | ENV | 346 | FVGLSPTVWL | XVXXXXXXXL | | 760 |
| 90 | 18 | X | 132 | FVLGGCRHKL | XVXXXXXXXL | | 761 |
| 95 | 19 | ENV | 342 | FVQWFVGL | XVXXXXXL | | 762 |
| 90 | 18 | POL | 766 | FVYVPSAL | XVXXXXXL | | 763 |
| 95 | 19 | POL | 630 | GFAAPFTQCGY | XFXXXXXXXXY | | 764 |
| 60 | 16 | ENV | 181 | GFFLLTRI | XFXXXXXI | | 765 |
| 80 | 16 | ENV | 181 | GFFLLTRIL | XFXXXXXXL | | 766 |
| 80 | 16 | ENV | 181 | GFFLLTRILTI | XFXXXXXXXXI | | 767 |
| 95 | 19 | ENV | 12 | GFFPCHCL | XFXXXXXL | | 768 |
| 75 | 15 | ENV | 170 | GFLGPLLVL | XFXXXXXXL | | 769 |
| 80 | 16 | POL | 500 | GFRKIPMGVGL | XFXXXXXXXXL | | 770 |
| 95 | 19 | POL | 627 | GLLGFAAPF | XLXXXXXXF | | 771 |
| 95 | 19 | POL | 509 | GLSPFLLAQF | XLXXXXXXXF | | 772 |
| 100 | 20 | ENV | 348 | GLSPTVWL | XLXXXXXL | | 773 |
| 75 | 15 | ENV | 348 | GLSPTVWLSVI | XLXXXXXXXXI | | 774 |
| 85 | 17 | PLC | 29 | GMDIDPYKEF | XMXXXXXXF | | 775 |
| 90 | 18 | ENV | 265 | GMLPVCPL | XMXXXXXL | | 776 |
| 90 | 18 | POL | 735 | GTDNSVVL | XTXXXXXL | | 777 |
| 75 | 15 | ENV | 13 | GTNLSVPNPL | XTXXXXXXXL | | 778 |
| 80 | 16 | POL | 763 | GTSFVYVPSAL | XTXXXXXXXXXL | | 779 |
| 80 | 16 | POL | 507 | GVGLSPFL | XVXXXXXL | | 780 |
| 80 | 16 | POL | 507 | GVGLSPFLL | XVXXXXXXL | | 781 |
| 95 | 19 | NUC | 123 | GVWIRTPPAY | XVXXXXXXXY | | 782 |
| 85 | 17 | NUC | 25 | GWLWGMDI | XWXXXXXI | | 783 |
| 85 | 17 | NUC | 25 | GWLWGMDIDPY | XWXXXXXXXXY | | 784 |
| 85 | 17 | ENV | 85 | GWSPQPQGI | XWXXXXXXI | 0.0024 | 785 |
| 85 | 17 | ENV | 65 | GWSPQAQGIL | XWXXXXXXXL | 0.0003 | 786 |
| 95 | 19 | POL | 639 | GYPALMPL | XYXXXXXL | | 787 |
| 95 | 19 | POL | 639 | GYPALMPL | XYXXXXXL | 0.0490 | 788 |
| 95 | 19 | ENV | 234 | GYRWMCLRRF | XYXXXXXXXF | 0.0110 | 789 |
| 95 | 19 | ENV | 234 | GYRWMCLRRFI | XYXXXXXXXXI | | 790 |
| 85 | 17 | POL | 579 | GYSLNFMGY | XYXXXXXXY | 0.0002 | 791 |
| 75 | 15 | POL | 579 | GYSLNFMGYVI | XYXXXXXXXXI | | 792 |
| 80 | 16 | POL | 820 | HFASPLHVAW | XFXXXXXXXW | | 793 |
| 75 | 15 | POL | 7 | HFRKLLLL | XFXXXXXL | | 794 |
| 80 | 16 | POL | 435 | HLLVGSSGL | XLXXXXXXL | | 795 |
| 75 | 15 | POL | 569 | HLNPNKTKRW | XLXXXXXXXW | | 796 |
| 80 | 16 | POL | 491 | HLYSHPII | XLXXXXXI | | 797 |
| 80 | 16 | POL | 491 | HLYSHPIIL | XLXXXXXXL | | 798 |
| 80 | 16 | POL | 491 | HLYSHPIILGF | XLXXXXXXXXXF | | 799 |
| 85 | 17 | POL | 715 | HTAELLAACF | XTXXXXXXXF | | 800 |
| 100 | 20 | NUC | 52 | HTALRQAI | XTXXXXXI | | 801 |
| 95 | 19 | NUC | 52 | HTALRQAIL | XTXXXXXXL | | 802 |
| 95 | 19 | NUC | 52 | HTALRQAILCW | XTXXXXXXXXW | | 803 |
| 100 | 20 | POL | 149 | HTLWKAGI | XTXXXXXI | | 804 |
| 100 | 20 | POL | 149 | HTLWKAGIL | XTXXXXXXL | | 805 |
| 100 | 20 | POL | 149 | HTLWKAGILY | XTXXXXXXXY | | 806 |
| 100 | 20 | POL | 146 | HYLHTLWKAGI | XYXXXXXXXXI | | 807 |
| 100 | 20 | ENV | 381 | IFFCLWVY | XFXXXXXY | | 808 |
| 100 | 20 | ENV | 381 | IFFCLWVYI | XFXXXXXXI | 0.0087 | 809 |
| 80 | 16 | ENV | 245 | IFLFILLL | XFXXXXXL | | 810 |
| 80 | 16 | ENV | 245 | IFLFILLLCL | XFXXXXXXXL | | 811 |
| 80 | 16 | ENV | 245 | IFLFILLLCLI | XFXXXXXXXXI | | 812 |
| 95 | 19 | ENV | 255 | IFLLVLLDY | XFXXXXXXY | | 813 |
| 80 | 16 | ENV | 244 | IIFLFILL | XIXXXXXL | | 814 |
| 80 | 16 | ENV | 244 | IIFLFILLL | XIXXXXXXL | | 815 |
| 80 | 16 | ENV | 244 | IIFLFILLLCL | XIXXXXXXXXL | | 816 |
| 80 | 16 | POL | 497 | IILGFRKI | XIXXXXXI | | 817 |
| 80 | 16 | POL | 497 | IILGFRKIPM | XIXXXXXXXM | | 818 |
| 90 | 18 | NUC | 59 | ILCWGELM | XLXXXXXM | | 819 |
| 80 | 16 | POL | 498 | ILGFRKIPM | XLXXXXXXXM | | 820 |
| 100 | 20 | ENV | 249 | ILLLCLIF | XLXXXXXF | | 821 |
| 100 | 20 | ENV | 249 | ILLLCLIFL | XLXXXXXXL | | 822 |
| 100 | 20 | ENV | 249 | ILLLCLIFLL | XLXXXXXXXL | | 823 |
| 80 | 16 | POL | 760 | ILRGTSFVY | XLXXXXXXY | | 824 |
| 95 | 19 | ENV | 188 | ILTIPQSL | XLXXXXXL | | 825 |
| 90 | 18 | ENV | 188 | ILTIPQSLDSW | XLXXXXXXXXW | | 826 |
| 90 | 18 | POL | 625 | IVGLLGFAAPF | XVXXXXXXXXF | | 827 |
| 8S | 17 | ENV | 358 | IWMMWYWGPS | XWXXXXXXXXL | 0.0004 | 828 |
| 95 | 19 | POL | 395 | KFAVPNLQSL | XFXXXXXXXL | 0.0020 | 829 |
| 80 | 16 | POL | 503 | KIPMGVGL | XIXXXXXL | | 830 |
| 80 | 16 | POL | 503 | KIPMGVGLSPF | XIXXXXXXXXF | | 831 |
| 85 | 17 | NUC | 21 | KLCLGWLW | XLXXXXXW | | 832 |
| 85 | 17 | NUC | 21 | KLCLGWLWGM | XLXXXXXXXM | | 833 |
| 95 | 19 | POL | 489 | KLHLYSHPI | XLXXXXXXI | | 834 |
| 80 | 16 | POL | 489 | KLHLYSHPII | XLXXXXXXXI | | 835 |
| 80 | 16 | POL | 489 | KLHLYSHPIIL | XLXXXXXXXXL | | 836 |
| 75 | 15 | POL | 108 | KLIMPARF | XLXXXXXF | | 837 |
| 75 | 15 | POL | 108 | KLIMPARFY | XLXXXXXXY | | 838 |
| 80 | 16 | POL | 610 | KLPVNRPI | XLXXXXXI | | 839 |
| 80 | 16 | POL | 610 | KLPVNRPIDW | XLXXXXXXXW | | 840 |
| 95 | 19 | POL | 574 | KTKRWGYSL | XTXXXXXXL | | 841 |
| 85 | 17 | POL | 574 | KTKRWGYSLNF | XTXXXXXXXF | | 842 |
| 85 | 17 | POL | 620 | KVCQRIVGL | XVXXXXXXL | | 843 |
| 85 | 17 | POL | 620 | KVCQRVGLL | XVXXXXXXXL | | 844 |
| 95 | 19 | POL | 55 | KVGNFTGL | XVXXXXXL | | 845 |
| 95 | 19 | POL | 55 | KVGNFTGLY | XVXXXXXXY | | 846 |
| 85 | 17 | X | 91 | KVLHKRTLGL | XVXXXXXXXL | | 847 |
| 85 | 17 | X | 91 | KVLHKRTLGL | XVXXXXXXXL | | 848 |
| 100 | 20 | POL | 121 | KYLPLDKGI | XYXXXXXXI | 0.0028 | 849 |
| 85 | 17 | POL | 745 | KYTSFPWL | XYXXXXXXL | | 850 |
| 8S | 17 | POL | 745 | KYTSFPWLL | XYXXXXXXL | 3.6000 | 851 |
| 80 | 16 | ENV | 247 | LFILLLCL | XFXXXXXL | | 852 |
| 80 | 16 | ENV | 247 | LFILLLCLI | XFXXXXXXI | | 853 |
| 80 | 16 | ENV | 247 | LFILLLCLIF | XFXXXXXXXF | | 854 |
| 80 | 16 | ENV | 247 | LFILLLCLIFL | XFXXXXXXXXL | | 855 |
| 100 | 20 | ENV | 254 | LIFLLVL | XIXXXXXXL | | 856 |
| 95 | 19 | ENV | 254 | LIFLLVLLDY | XIXXXXXXXY | | 857 |
| 100 | 20 | POL | 109 | LIMPARFY | XIXXXXXY | | 858 |
| 95 | 19 | POL | 514 | LLAQFTSAI | XLXXXXXXI | | 859 |
| 100 | 20 | ENV | 251 | LLCLIFLL | XLXXXXXL | | 860 |
| 100 | 20 | ENV | 251 | LLCLIFLLVL | XLXXXXXXXL | | 861 |
| 100 | 20 | ENV | 251 | LLCIFLLVLL | XLXXXXXXXXL | | 862 |
| 85 | 17 | NUC | 30 | LLDTASAL | XLXXXXXL | | 863 |
| 85 | 17 | NUC | 30 | LLDTASALY | XLXXXXXXY | | 864 |
| 95 | 19 | ENV | 260 | LLDYQGML | XLXXXXXL | | 865 |
| 80 | 16 | POL | 752 | LLGCAANW | XLXXXXXW | | 866 |
| 80 | 16 | POL | 752 | LLGCAANWI | XLXXXXXXI | | 867 |
| 80 | 16 | POL | 752 | LLGCAANWIL | XLXXXXXXXL | | 868 |
| 95 | 19 | POL | 628 | LLGFAAPF | XLXXXXXF | | 869 |
| 75 | 15 | ENV | 63 | LLGWSPQAQGI | XLXXXXXXXXI | | 870 |
| 100 | 20 | ENV | 250 | LLLCLIFL | XLXXXXXL | | 871 |
| 100 | 20 | ENV | 250 | LLLCLIFLL | XLXXXXXXL | | 872 |
| 100 | 20 | ENV | 250 | LLLCLIFLLVL | XLXXXXXXXXL | | 873 |
| 100 | 20 | ENV | 378 | LLPIFFCL | XLXXXXXL | | 874 |
| 100 | 20 | ENV | 378 | LLPIFFCLW | XLXXXXXXW | | 875 |
| 100 | 20 | ENV | 378 | LLPIFFCLWVY | XLXXXXXXXXY | | 876 |
| 95 | 19 | NUC | 44 | LLSFLPSDF | XLXXXXXXF | | 877 |
| 95 | 19 | NUC | 44 | LLSFLPSDFF | XLXXXXXXXF | | 878 |
| 95 | 19 | POL | 563 | LLSLGIHL | XLXXXXXL | | 879 |
| 90 | 18 | POL | 407 | LLSSNLSW | XLXXXXXL | | 880 |
| 90 | 18 | POL | 407 | LLSSNLSWLSL | XLXXXXXXL | | 881 |
| 90 | 18 | POL | 407 | LLSSNSWLSL | XLXXXXXXXXL | | 882 |
| 80 | 16 | ENV | 184 | LLTRILTI | XLXXXXXI | | 883 |
| 80 | 16 | POL | 436 | LLVGSSGL | XLXXXXXL | | 884 |
| 95 | 19 | ENV | 257 | LLVLLDYQGM | XLXXXXXXXM | | 885 |
| 95 | 19 | ENV | 257 | LLVLLDTQGML | XLXXXXXXXXL | | 886 |
| 95 | 19 | ENV | 175 | LLVLQAGF | XLXXXXXF | | 887 |
| 95 | 19 | ENV | 175 | LLVLQAGFF | XLXXXXXXF | | 888 |
| 90 | 18 | ENV | 175 | LLVLQAGFFL | XLXXXXXXXL | | 889 |
| 90 | 18 | ENV | 175 | LLVLQAGFFLL | XLXXXXXXXXL | | 890 |
| 100 | 20 | ENV | 338 | LLVPFVQW | XLXXXXXW | | 891 |
| 100 | 20 | ENV | 338 | LLVPFVQWF | XLXXXXXXF | | 892 |
| 90 | 18 | NUC | 100 | LLWFHISCL | XLXXXXXXL | | 893 |
| 85 | 17 | NUC | 100 | LLWFHISCLTF | XLXXXXXXXXF | | 894 |
| 95 | 19 | POL | 643 | LMPLYACI | XMXXXXXI | | 895 |
| 75 | 15 | NUC | 137 | LTFGRETVL | XTXXXXXXL | | 896 |
| 75 | 15 | NUC | 137 | LTFGRETVLEY | XTXXXXXXXXY | | 897 |
| 90 | 18 | ENV | 189 | LTIPQSLDSW | XTXXXXXXXW | | 898 |
| 90 | 18 | ENV | 189 | LTIPQSLDSWW | XTXXXXXXXXW | | 899 |
| 90 | 18 | POL | 404 | LTNLLSSNL | XTXXXXXXL | | 900 |
| 90 | 18 | POL | 404 | LTNLLSSNLSW | XTXXXXXXXXW | | 901 |
| 80 | 16 | ENV | 185 | LTRILTIPQSL | XTXXXXXXXXL | | 902 |
| 85 | 17 | POL | 99 | LTVNEKRRL | XTXXXXXXL | | 903 |
| 95 | 19 | ENV | 258 | LVLLDYQGM | XVXXXXXXM | | 904 |
| 95 | 19 | ENV | 258 | LVLLDYQGML | XVXXXXXXXL | | 905 |
| 95 | 19 | ENV | 176 | LVLQAGFF | XVXXXXXF | | 906 |
| 90 | 18 | ENV | 176 | LVLQAGFFL | XVXXXXXXL | | 907 |
| 90 | 18 | ENV | 176 | LVLQAGFFLL | XVXXXXXXXL | | 908 |
| 100 | 20 | ENV | 339 | LVPFVQWF | XVXXXXXXF | | 909 |
| 95 | 19 | ENV | 339 | LVPFVQWFVGL | XVXXXXXXXXL | | 910 |
| 90 | 18 | NUC | 119 | LVSFGVWI | XVXXXXXI | | 911 |
| 100 | 20 | POL | 377 | LVVDFSQF | XVXXXXXF | | 810 |
| 90 | 18 | NUC | 101 | LWFHISCL | XWXXXXXL | | 913 |
| 85 | 17 | NUC | 101 | LWFHISCLTF | XWXXXXXXXF | | 914 |
| 85 | 17 | NUC | 27 | LWGMDIDPY | XWXXXXXXY | | 915 |
| 100 | 20 | POL | 151 | LWKAGILY | XWXXXXXY | | 916 |
| 80 | 16 | POL | 492 | LYSHPIIL | XYXXXXXL | | 917 |
| 80 | 16 | POL | 492 | LYSHPIILGF | XYXXXXXXXF | 1.1000 | 918 |
| 85 | 17 | ENV | 360 | MMWYWGPSL | XMXXXXXXL | 0.0012 | 919 |
| 85 | 17 | ENV | 360 | MMWYWGPSLY | XMXXXXXXXY | 0.0001 | 920 |
| 85 | 17 | ENV | 361 | MWYWGPSL | XWXXXXXL | | 921 |
| 85 | 17 | ENV | 361 | MWYWGPSLY | XWXXXXXXY | 0.0027 | 922 |
| 95 | 19 | POL | 561 | NFLLSLGI | XFXXXXXI | | 923 |
| 95 | 19 | POL | 561 | NFLLSLGIHL | XFXXXXXXXL | 0.0099 | 924 |
| 95 | 19 | POL | 42 | NLGNLNVSI | XLXXXXXXI | | 925 |
| 95 | 19 | POL | 42 | NLGNLNVSIPW | XLXXXXXXXXW | | 926 |
| 90 | 18 | POL | 406 | NLLSSNLSW | XLXXXXXXW | | 927 |
| 90 | 18 | POL | 406 | NLLSSNLSWL | XLXXXXXXXL | | 928 |
| 95 | 19 | POL | 45 | NLNVSIPW | XLXXXXXXW | | 929 |
| 100 | 20 | POL | 400 | NLQSLTNL | XLXXXXXL | | 930 |
| 100 | 20 | POL | 400 | NLQSLTNLL | XLXXXXXXL | | 931 |
| 75 | 15 | ENV | 15 | NLSVPNPL | XLXXXXXL | | 932 |
| 75 | 15 | ENV | 15 | NLSVPNPLGF | XLXXXXXXXF | | 933 |
| 80 | 16 | POL | 758 | NWILRGTSF | XWXXXXXXF | | 934 |
| 80 | 16 | POL | 758 | NWILRGTSFVY | XWXXXXXXXXY | | 935 |
| 95 | 19 | POL | 512 | PFLLAQFTSAI | XFXXXXXXXXI | | 936 |
| 95 | 19 | POL | 634 | PFTQCGYPAL | XFXXXXXXXL | 0.0002 | 937 |
| 95 | 19 | POL | 634 | PFTQCGYPALM | XFXXXXXXXXM | | 938 |
| 95 | 19 | ENV | 341 | PFVQWFVGL | XFXXXXXXL | 0.0003 | 939 |
| 85 | 17 | POL | 616 | PIDWKVCQRI | XIXXXXXXXI | | 940 |
| 100 | 20 | ENV | 380 | PIFFCLWVY | XIXXXXXXY | | 941 |
| 100 | 20 | ENV | 380 | PIFFCLWVYI | XIXXXXXXXI | | 942 |
| 85 | 17 | POL | 713 | PIHTAELL | XIXXXXXL | | 943 |
| 80 | 16 | POL | 496 | PIILGFRKI | XIXXXXXXI | | 944 |
| 80 | 16 | POL | 496 | PIILGFRKIPM | XIXXXXXXXXM | | 945 |
| 100 | 20 | ENV | 314 | PIPSSWAF | XIXXXXXF | | 946 |
| 100 | 20 | POL | 124 | PLDKGIKPY | XLXXXXXXY | | 947 |
| 100 | 20 | POL | 124 | PLDKGIKPY | XLXXXXXXY | | 948 |
| 95 | 19 | POL | 20 | PLEEELPRL | XLXXXXXXL | | 949 |
| 95 | 19 | ENV | 10 | PLGFFPDHQL | XLXXXXXXXXL | | 950 |
| 100 | 20 | POL | 427 | PLHPAAMPHL | XLXXXXXXXL | | 951 |
| 100 | 20 | POL | 427 | PLHPAAMPHLL | XLXXXXXXXXL | | 952 |
| 100 | 20 | ENV | 377 | PLLPIFFCL | XLXXXXXXL | | 953 |
| 100 | 20 | ENV | 377 | PLLPIFFCLW | XLXXXXXXXXW | | 954 |
| 95 | 19 | ENV | 174 | PLLVLQAGF | XLXXXXXXF | | 955 |
| 95 | 19 | ENV | 174 | PLLVLQAGFF | XLXXXXXXXF | | 956 |
| 90 | 18 | ENV | 174 | PLLVLQAGFFL | XLXXXXXXXXL | | 957 |
| 80 | 16 | POL | 711 | PLPIHTAEL | XLXXXXXXL | | 958 |
| 80 | 16 | POL | 711 | PLPIHTAELL | XLXXXXXXXL | | 959 |
| 75 | 15 | POL | 2 | PLSYQHFRKL | XLXXXXXXXL | | 960 |
| 75 | 15 | POL | 2 | PLSYQHFRKLL | XLXXXXXXXXL | | 961 |
| 85 | 17 | POL | 98 | PLTVNEKRRL | XLXXXXXXXL | | 962 |
| 80 | 16 | POL | 505 | PMGVGLSPF | XMXXXXXXF | | 963 |
| 80 | 16 | POL | 505 | PMGVGLSPFL | XMXXXXXXXL | | 964 |
| 80 | 16 | POL | 505 | PMGVGLSPFLL | XMXXXXXXXXL | | 965 |
| 75 | 15 | POL | 692 | PTGWGLAI | XTXXXXXI | | 966 |
| 85 | 17 | POL | 797 | PTTGRTSL | XTXXXXXL | | 967 |
| 85 | 17 | POL | 797 | PTTGRTSLY | XTXXXXXXY | | 968 |
| 80 | 16 | NUC | 15 | PTVQASKL | XTXXXXXL | | 969 |
| 80 | 16 | NUC | 15 | PTVQASKLCL | XTXXXXXXXL | | 970 |
| 75 | 15 | ENV | 351 | PTVWLSVI | XTXXXXXI | | 971 |
| 75 | 15 | ENV | 351 | PTVWLSVIW | XTXXXXXXW | | 972 |
| 75 | 15 | ENV | 351 | PTVWLSVIWM | XTXXXXXXXM | | 973 |
| 85 | 17 | POL | 612 | PVNRPIDW | XVXXXXXW | | 974 |
| 80 | 16 | POL | 750 | PWLLGCAANW | XWXXXXXXXW | | 975 |
| 80 | 16 | POL | 750 | PWLLGCAANWI | XWXXXXXXXXI | | 976 |
| 100 | 20 | POL | 51 | PWTHKVGNF | XWXXXXXXF | 0.0290 | 977 |
| 80 | 16 | X | 8 | QLDPARDVL | XLXXXXXXL | | 978 |
| 80 | 16 | X | 8 | QLDPARDVLCL | XLXXXXXXXXL | | 979 |
| 90 | 18 | NUC | 99 | QLLWFHISCL | XLXXXXXXXL | | 980 |
| 95 | 19 | POL | 685 | QVFADATPTGW | XVXXXXXXXXW | | 981 |
| 95 | 19 | ENV | 344 | QWFVGLSPTVW | XWXXXXXXXX | | 982 |
| 75 | 15 | ENV | 242 | RFIIFLFI | XFXXXXXI | | 983 |
| 75 | 15 | ENV | 242 | RFIIFLFIL | XFXXXXXXL | | 984 |
| 75 | 15 | ENV | 242 | RFIIFLFILL | XFXXXXXXXL | | 985 |
| 75 | 15 | ENV | 242 | RFIIFLFILLL | XFXXXXXXXXL | | 986 |
| 100 | 20 | ENV | 332 | RFSWLSLL | XFXXXXXL | | 987 |
| 100 | 20 | ENV | 332 | RFSWLSLLVPF | XFXXXXXXXXF | | 988 |
| 80 | 16 | ENV | 187 | RILTIPQSL | XIXXXXXXL | | 989 |
| 90 | 18 | POL | 624 | RIGLLGF | XIXXXXXF | | 990 |
| 75 | 15 | POL | 106 | RLKLIMPARF | XLXXXXXXXF | | 991 |
| 75 | 15 | POL | 106 | RLKLIMPARFY | XLXXXXXXXXY | | 992 |
| 95 | 19 | POL | 376 | RLVVDVSQF | XLXXXXXXF | | 993 |
| 90 | 18 | POL | 353 | RTPARVTGGVF | XTXXXXXXXXF | | 994 |
| 95 | 19 | POL | 36 | RVAEDLNL | XVXXXXXL | | 995 |
| 90 | 18 | POL | 36 | RVAEDLNLGNL | XVXXXXXXXXL | | 996 |
| 80 | 16 | POL | 818 | RVHFASPL | XVXXXXXL | | 997 |
| 100 | 20 | POL | 357 | RVTGGVFL | XVXXXXXL | | 998 |
| 85 | 17 | POL | 577 | RWGYSLNF | XWXXXXXF | | 999 |
| 85 | 17 | POL | 577 | RWGYSLNFM | XWXXXXXXM | | 1000 |
| 85 | 17 | POL | 577 | RWGYSLNFMGY | XWXXXXXXXXY | | 1001 |
| 95 | 19 | ENV | 236 | RWMCLRRF | XWXXXXXF | | 1002 |
| 95 | 19 | ENV | 236 | RWMCLRRFI | XWXXXXXXI | 0.0710 | 1003 |
| 95 | 19 | ENV | 236 | RWMCLRRFII | XWXXXXXXXI | 1.1000 | 1004 |
| 95 | 19 | ENV | 236 | RWMCLRRFIIF | XWXXXXXXXXF | | 1005 |
| 100 | 20 | POL | 167 | SFCGSPYSW | XFXXXXXXW | 0.0710 | 1006 |
| 95 | 19 | NUC | 46 | SFLPSDFF | XFXXXXXF | | 1007 |
| 80 | 16 | POL | 765 | SFVYVPSAL | XFXXXXXXL | | 1008 |
| 100 | 20 | POL | 49 | SIPWTHKVGNF | XIXXXXXXXXF | | 1009 |
| 95 | 19 | ENV | 194 | SLDSWWTSL | XLXXXXXXL | | 1010 |
| 95 | 19 | ENV | 194 | SLDSWWTSLNF | XLXXXXXXXXF | | 1011 |
| 95 | 19 | POL | 416 | SLDVSAAF | XLXXXXXF | | 1012 |
| 95 | 19 | POL | 416 | SLDVSAAFY | XLXXXXXXY | | 1013 |
| 100 | 20 | ENV | 337 | SLLVPFVQW | XLXXXXXXW | | 1014 |
| 100 | 20 | ENV | 337 | SLLVPFVQWF | XLXXXXXXXF | | 1015 |
| 75 | 15 | POL | 581 | SLNFMGYVI | XLXXXXXXI | | 1016 |
| 95 | 19 | X | 54 | SLRGLPVCAF | XLXXXXXXXF | | 1017 |
| 90 | 18 | POL | 403 | SLTNLLSSNL | XLXXXXXXXL | | 1018 |
| 75 | 15 | X | 104 | STTDLEAY | XTXXXXXY | | 1019 |
| 75 | 15 | X | 104 | STTDLEAYF | XTXXXXXXF | | 1020 |
| 75 | 15 | ENV | 17 | SVPNPLGF | XVXXXXXF | | 1021 |
| 85 | 17 | POL | 548 | SVQHLESL | XVXXXXXL | | 1022 |
| 80 | 16 | ENV | 330 | SVRFSNWLSL | XVXXXXXXL | | 1023 |
| 80 | 16 | ENV | 330 | SVRFSWLSLL | XVXXXXXXXL | | 1024 |
| 90 | 18 | POL | 739 | SVVLSRKY | XVXXXXXY | | 1025 |
| 85 | 17 | POL | 739 | SVVLSRKYTSF | XVXXXXXXXXXF | | 1026 |
| 95 | 19 | POL | 524 | SVVRRAFPHCL | XVXXXXXXXXL | | 1027 |
| 95 | 19 | POL | 413 | SWLSLDVSAAF | XWXXXXXXXXF | | 1028 |
| 100 | 20 | ENV | 334 | SWLSLLVPF | XWXXXXXXF | 0.3900 | 1029 |
| 95 | 19 | POL | 392 | SWPKFAVPNL | XWXXXXXXXL | 5.6000 | 1030 |
| 100 | 20 | ENV | 197 | SWWTSLNF | XWXXXXXF | | 1031 |
| 95 | 19 | ENV | 197 | SWWTSLNFL | XWXXXXXXL | 0.3800 | 1032 |
| 90 | 18 | POL | 537 | SWMDDVVL | XYXXXXXL | | 1033 |
| 75 | 15 | POL | 4 | SYQHFRKL | XYXXXXXL | | 1034 |
| 75 | 15 | POL | 4 | SYQHFRKLL | XYXXXXXXL | 0.0051 | 1035 |
| 75 | 15 | POL | 4 | SYQHFRKLLL | XYXXXXXXXL | 0.0660 | 1036 |
| 75 | 15 | POL | 4 | SYQHFRKLLLL | XYXXXXXXXXL | | 1037 |
| 75 | 15 | NUC | 138 | TFGRETVL | XFXXXXXL | | 1038 |
| 75 | 15 | NUC | 138 | TFGRETVLEY | XFXXXXXXXY | | 1039 |
| 75 | 15 | NUC | 138 | TFGRETVLEYL | XFXXXXXXXXXL | | 1040 |
| 95 | 19 | POL | 657 | TFSPTYKAF | XFXXXXXXF | 0.0060 | 1041 |
| 95 | 19 | POL | 657 | TFSPTYKAFL | XFXXXXXXXL | 0.0043 | 1042 |
| 90 | 18 | ENV | 190 | TIPQSLDSW | XIXXXXXXW | | 1043 |
| 90 | 18 | ENV | 190 | TIPQSLDSWW | XIXXXXXXXW | | 1044 |
| 100 | 20 | POL | 150 | TLWKAGIL | XLXXXXXL | | 1045 |
| 100 | 20 | POL | 150 | TLWKAGILY | XLXXXXXXY | | 1046 |
| 75 | 15 | X | 105 | TTDLEAYF | XTXXXXXF | | 1047 |
| 85 | 17 | POL | 798 | TTGRTSLY | XTXXXXXY | | 1048 |
| 85 | 17 | POL | 100 | TVNEKRRL | XVXXXXXL | | 1049 |
| 80 | 16 | NUC | 16 | TVQASKLCL | XVXXXXXXL | | 1050 |
| 80 | 16 | NUC | 16 | TVQASKLCLGW | XVXXXXXXXXW | | 1051 |
| 75 | 15 | ENV | 352 | TVWLSVIW | XVXXXXXW | | 1052 |
| 75 | 15 | ENV | 352 | TVWLSVIWM | XVXXXXXXM | | 1053 |
| 95 | 19 | POL | 686 | VFADATPTGW | XFXXXXXXXW | 0.0180 | 1054 |
| 75 | 15 | X | 131 | VFVLGGCRHKL | XFXXXXXXXXL | | 1055 |
| 85 | 17 | POL | 543 | VLGAKSVQHL | XLXXXXXXXL | | 1056 |
| 90 | 18 | X | 133 | VLGGCRHKL | XLXXXXXXL | | 1057 |
| 85 | 17 | X | 92 | VLHKRTLGL | XLXXXXXXL | | 1058 |
| 95 | 19 | ENV | 259 | VLLDYQGM | XLXXXXXM | | 1059 |
| 95 | 19 | ENV | 259 | VLLDYQGML | XLXXXXXXL | | 1060 |
| 95 | 19 | ENV | 177 | VLQAGFFL | XLXXXXXL | | 1061 |
| 95 | 19 | ENV | 177 | VLQAGFFLL | XLXXXXXXL | | 1062 |
| 85 | 17 | POL | 741 | VLSRKYTSF | XLXXXXXXF | | 1063 |
| 85 | 17 | POL | 741 | VLSRKYTSFPW | XLXXXXXXXXXW | | 1064 |
| 80 | 16 | POL | 542 | VVLGAKSVQHL | XVXXXXXXXXL | | 1065 |
| 85 | 17 | POL | 740 | VVLSRKYTSF | XVXXXXXXXF | | 1066 |
| 95 | 19 | POL | 525 | VVRRAFPHCL | XVXXXXXXXL | | 1067 |
| 95 | 19 | NUC | 124 | VWIRTPPAY | XWXXXXXXY | | 1068 |
| 75 | 15 | ENV | 353 | VWLSVIWM | XWXXXXXM | | 1069 |
| 90 | 18 | NUC | 102 | WFHISCLTF | XFXXXXXXF | 0.0300 | 1070 |
| 95 | 19 | ENV | 345 | WFVGLSPTVW | XFXXXXXXXW | 0.0120 | 1071 |
| 95 | 19 | ENV | 345 | WFVGLSPTVWL | XFXXXXXXXXL | | 1072 |
| 80 | 16 | POL | 759 | WLRGTSF | XIXXXXXF | | 1073 |
| 80 | 16 | POL | 759 | WILRGTSFVY | XIXXXXXXXY | | 1074 |
| 95 | 19 | NUC | 125 | WIRTPPAY | XIXXXXXY | | 1075 |
| 80 | 16 | POL | 751 | WLLGCAANW | XLXXXXXXW | | 1076 |
| 80 | 16 | POL | 751 | WLLGCAANWI | XLXXXXXXXI | | 1077 |
| 80 | 16 | POL | 751 | WLLGCAANWIL | XLXXXXXXXXL | | 1078 |
| 95 | 19 | POL | 414 | WLSLDVSAAF | XLXXXXXXF | | 1079 |
| 95 | 19 | POL | 414 | WLSLDVSAAFY | XLXXXXXXXXY | | 1080 |
| 100 | 20 | ENV | 335 | WLSLLVPF | XIXXXXXF | | 1081 |
| 100 | 20 | ENV | 335 | WLSLLVPRVQW | XLXXXXXXXXW | | 1082 |
| 85 | 17 | NUC | 26 | WLWGMDIDPY | XLXXXXXXXY | | 1083 |
| 95 | 19 | ENV | 237 | WMCLRRFI | XMXXXXXI | | 1084 |
| 95 | 19 | ENV | 237 | WMCLRRFII | XMXXXXXXI | 0.0230 | 1085 |
| 95 | 19 | ENV | 237 | WMCLRRFIIF | XMXXXXXXXF | 0.0013 | 1086 |
| 95 | 19 | ENV | 237 | WMCLRRFIIFL | XMXXXXXXXXL | | 1087 |
| 85 | 17 | ENV | 359 | WMMWYWGPSL | XMXXXXXXXXL | 0.0005 | 1088 |
| 85 | 17 | ENV | 359 | WMMWYWGPSL | XMXXXXXXXXY | | 1089 |
| 100 | 20 | POL | 52 | WTHKVGNF | XTXXXXXF | | 1090 |
| 95 | 19 | POL | 52 | WTHKVGNFTGL | XTXXXXXXXXL | | 1091 |
| 95 | 19 | ENV | 198 | WWTSLNFL | XWXXXXXL | | 1092 |
| 85 | 17 | ENV | 362 | WYWGPSLY | XYXXXXXY | 0.0001 | 1093 |
| 100 | 20 | POL | 147 | YLHTLWKAGI | XLXXXXXXXI | | 1094 |
| 100 | 20 | POL | 147 | YLHTLWKAGIL | XLXXXXXXXXL | | 1095 |
| 100 | 20 | POL | 122 | YLPLDKGI | XLXXXXXI | | 1096 |
| 100 | 20 | POL | 122 | YLPLDKGIKPY | XLXXXXXXXXY | | 1097 |
| 90 | 18 | PLC | 118 | YLVSFGVW | XLXXXXXW | | 1098 |
| 90 | 18 | PLC | 118 | YLVSFGVWI | XLXXXXXXI | | 1099 |
| 85 | 17 | POL | 746 | YTSFPWLL | XTXXXXXL | | 1100 |

[0427] TABLE XI

HBV B07 SUPER MOTIF (With binding information)

| | | | | | | | | | | | | | |
|---|---|---|---|---|---|---|---|---|---|---|---|---|---|
| | | Pro- | | | | C- | | | | | | | SEQ |
| Conservancy | Frequency | tein | Position | Sequence | P2 | term | AA | B*0702 | B*3501 | B*5101 | B*5301 | B*5401 | ID NO |

| | | | | | | | | | | | | | |
|---|---|---|---|---|---|---|---|---|---|---|---|---|---|
| 75 | 15 | X | 148 | APCNFFTSA | P | A | 9 | | | | | | 1101 |
| 95 | 19 | POL | 833 | APFTQCGY | P | Y | 8 | 0.0001 | 0.0012 | 0.0019 | 0.0002 | 0.0002 | 1102 |
| 95 | 19 | POL | 633 | APFTQCGYPA | P | A | 10 | 0.0029 | 0.0001 | 0.0002 | 1.4000 | 1103 | |
| 95 | 19 | POL | 633 | APFTQCGYPAL | P | L | 11 | 0.2300 | 0.0010 | 0.0004 | −0.0003 | 0.0093 | 1104 |
| 100 | 20 | ENV | 232 | CPGYRWMCL | P | L | 9 | | | | | | 1105 |
| 80 | 16 | NUC | 14 | CPTVQASKL | P | L | 9 | | | | | | 1106 |
| 80 | 16 | NUC | 14 | CPTVQASKLCL | P | L | 11 | | | | | | 1107 |
| 80 | 16 | X | 10 | DPARDVLCL | P | L | 9 | | | | | | 1108 |
| 80 | 16 | ENV | 122 | DPRVRGLY | P | Y | 8 | | | | | | 1109 |
| 90 | 18 | POL | 778 | DPSRGRLGL | P | L | 9 | 0.0120 | 0.0001 | 0.0001 | 0.0001 | 0.0001 | 1110 |
| 90 | 18 | NUC | 33 | DPYKEFGA | P | A | 8 | 0.0001 | 0.0001 | 0.0019 | 0.0002 | 0.0019 | 1111 |
| 75 | 15 | ENV | 130 | FPAGGSSSGTV | P | V | 11 | | | | | | 1112 |
| 90 | 18 | ENV | 14 | FPDHQLDPA | P | A | 9 | | | | | | 1113 |
| 85 | 17 | ENV | 14 | FPDHQLDPAF | P | F | 10 | 0.0002 | 0.0016 | 0.0003 | 0.0011 | 0.0021 | 1114 |
| 95 | 19 | POL | 530 | FPHCLAFSY | P | Y | 9 | 0.0001 | 0.5250 | 0.0665 | 0.5400 | 0.0199 | 1115 |
| 95 | 19 | POL | 530 | FPHCLAFSYM | P | M | 10 | 0.0990 | 0.2200 | 0.0900 | 0.0790 | 0.0480 | 1116 |
| 75 | 15 | POL | 749 | FPWLLGCA | P | A | 8 | | | | | | 1117 |
| 75 | 15 | POL | 749 | FPWLLGCAA | P | A | 9 | | | | | | 1118 |
| 75 | 15 | POL | 749 | FPWLLGCAANW | P | W | 11 | | | | | | 1119 |
| 90 | 18 | X | 67 | GPCALRFTSA | P | A | 10 | 0.0900 | 0.0001 | 0.0001 | 0.0002 | 0.0035 | 1120 |
| 95 | 19 | POL | 19 | GPLEEELPRL | P | L | 10 | 0.0001 | 0.0001 | 0.0002 | 0.0001 | 0.0002 | 1121 |
| 90 | 18 | POL | 19 | GPLEEELPRLA | P | A | 11 | −0.0002 | 0.0001 | 0.0001 | −0.0003 | 0.0001 | 1122 |
| 95 | 19 | ENV | 173 | GPLLVLQA | P | A | 8 | 0.0003 | 0.0001 | 0.0110 | 0.0002 | 0.0065 | 1123 |
| 95 | 19 | ENV | 173 | GPLLVLQAGF | P | F | 10 | 0.0001 | 0.0001 | 0.0002 | 0.0001 | 0.0002 | 1124 |
| 95 | 19 | ENV | 173 | GPLLVLQAGFF | P | F | 11 | 0.0011 | 0.0001 | 0.0001 | 0.0008 | 0.0009 | 1125 |
| 85 | 17 | POL | 97 | GPLTVNEKRRL | P | 1 | 11 | 0.0031 | 0.0001 | 0.0001 | −0.0003 | 0.0001 | 1126 |
| 100 | 20 | POL | 429 | HPAAMPHL | P | L | 8 | 0.0650 | 0.0004 | 0.3100 | 0.0037 | 0.0160 | 1127 |
| 100 | 20 | POL | 429 | HPAAMPHLL | P | L | 9 | 0.0980 | 0.0270 | 0.0110 | 0.0500 | 0.0120 | 1128 |
| 85 | 17 | POL | 429 | HPAAMPHLLV | P | V | 10 | 0.0160 | 0.0020 | 0.0078 | 0.0140 | 0.0170 | 1129 |
| 80 | 16 | POL | 495 | HPIILGFRKI | P | I | 10 | | | | | | 1130 |
| 100 | 20 | ENV | 313 | IPIPSSWA | P | A | 8 | 0.0004 | 0.0004 | 0.0019 | 0.0002 | 0.0600 | 1131 |
| 100 | 20 | ENV | 313 | IPIPSSWAF | P | F | 9 | 0.1300 | 2.7679 | 2.3500 | 0.7450 | 0.0034 | 1132 |
| 80 | 16 | ENV | 313 | IPIPSSWAFA | P | A | 10 | 0.0013 | 0.0024 | | 0.0014 | 0.4500 | 1133 |
| 80 | 16 | POL | 504 | IPMGVGLSPF | P | F | 10 | | | | | | 1134 |
| 80 | 16 | POL | 504 | IPMGVGLSPFL | P | L | 11 | | | | | | 1135 |
| 90 | 18 | ENV | 191 | IPQSLDSW | P | W | 8 | | | | | | 1136 |
| 90 | 18 | ENV | 191 | IPQSLDSWW | P | W | 9 | | | | | | 1137 |
| 80 | 16 | ENV | 315 | IPSSWAFA | P | A | 8 | | | | | | 1138 |
| 100 | 20 | POL | 50 | IPWTHKVGNF | P | F | 10 | 0.0013 | 0.0001 | 0.0007 | 0.0001 | 0.0002 | 1139 |
| 100 | 20 | ENV | 379 | LPIFFCLW | P | W | 8 | 0.0001 | 0.0001 | 0.0360 | 0.1400 | 0.0035 | 1140 |
| 100 | 20 | ENV | 379 | LPIFFCLWV | P | V | 9 | | | | | | 1141 |
| 100 | 20 | ENV | 379 | LPIFFCLWVY | P | V | 10 | 0.0002 | 0.0079 | 0.0002 | 0.0006 | 0.0002 | 1142 |
| 100 | 20 | ENV | 379 | LPIFFCLWVYI | P | I | 11 | 0.0002 | 0.0001 | 0.0043 | 0.0139 | 0.0021 | 1143 |
| 85 | 17 | POL | 712 | LPIHTAEL | P | L | 8 | | | | | | 1144 |
| 85 | 17 | POL | 712 | LPIHTAELL | P | L | 9 | 0.0040 | 0.0630 | 0.0052 | 0.3100 | 0.0005 | 1145 |
| 85 | 17 | POL | 712 | LPIHTAELLA | P | A | 10 | 0.0018 | 0.0011 | | 0.0016 | 0.3300 | 1146 |
| 85 | 17 | POL | 712 | LPIHTAELLAA | P | A | 11 | 0.0090 | 0.0027 | −0.0003 | 0.0120 | 2.7500 | 1147 |
| 80 | 16 | X | 89 | LPKVLHKRTL | P | L | 10 | | | | | | 1148 |
| 100 | 20 | POL | 123 | LPLDKGIKPY | P | Y | 10 | 0.0001 | 0.0290 | 0.0002 | 0.0003 | 0.0002 | 1149 |
| 100 | 20 | POL | 123 | LPLDKGIKPYY | P | Y | 11 | −0.0002 | 0.0009 | 0.0001 | 0.0007 | 0.0001 | 1150 |
| 95 | 19 | X | 58 | LPVCAFSSA | P | A | 9 | 0.0480 | 0.0710 | 0.0110 | 0.0009 | 19.0000 | 1151 |
| 80 | 16 | POL | 611 | LPVNRPIDW | P | W | 9 | | | | | | 1152 |
| 80 | 16 | POL | 611 | LPVNRPIDWKV | P | V | 11 | | | | | | 1153 |
| 80 | 16 | POL | 433 | MPHLLVGSSGL | P | L | 11 | | | | | | 1154 |
| 100 | 20 | POL | 1 | MPLSYQHF | P | F | 8 | 0.0001 | 0.0097 | 0.0120 | 0.0370 | 0.0190 | 1155 |
| 75 | 15 | POL | 1 | MPLSYQHFRKL | P | L | 11 | | | | | | 1156 |
| 90 | 18 | POL | 774 | NPADDPSRGRL | P | L | 11 | 0.0120 | 0.0001 | 0.0001 | −0.0003 | 0.0001 | 1157 |
| 95 | 19 | ENV | 9 | NPLGFFPDQL | P | L | 11 | 0.0012 | 0.0021 | 0.0001 | 0.0028 | 0.0001 | 1158 |
| 75 | 15 | POL | 571 | NPNKTKRW | P | W | 8 | | | | | | 1159 |
| 75 | 15 | POL | 571 | NPNKTKRWGY | P | Y | 10 | | | | | | 1160 |
| 95 | 19 | NUC | 129 | PPAYRPPNA | P | A | 9 | 0.0001 | 0.0001 | 0.0001 | 0.0002 | 0.0003 | 1161 |
| 95 | 19 | NUC | 129 | PPAYRPPNAPI | P | I | 11 | 0.0003 | 0.0001 | 0.0001 | −0.0003 | 0.0001 | 1162 |
| 85 | 17 | ENV | 58 | PPHGGLLGW | P | W | 9 | 0.0001 | 0.0002 | 0.0001 | 0.0003 | 0.0002 | 1163 |
| 100 | 20 | NUC | 134 | PPNAPILSTL | P | L | 10 | 0.0001 | 0.0001 | 0.0035 | 0.0001 | 0.0002 | 1164 |
| 80 | 18 | POL | 615 | RPIDWKVCQRI | P | I | 11 | | | | | | 1165 |
| 100 | 20 | NUC | 133 | RPPNAPIL | P | L | 8 | 0.0076 | 0.0001 | 0.0280 | 0.0002 | 0.0002 | 1166 |
| 100 | 20 | NUC | 133 | RPPNAPILSTL | P | L | 11 | 0.1300 | 0.0001 | 0.0018 | −0.0003 | 0.0001 | 1167 |
| 100 | 20 | NUC | 44 | SPEHCSPHTTA | P | A | 11 | −0.0002 | 0.0001 | 0.0001 | −0.0003 | 0.0011 | 1168 |
| 95 | 19 | POL | 511 | SPFLLAQF | P | F | 8 | 0.5500 | 0.0009 | 0.0180 | 0.0009 | 0.0093 | 1169 |
| 95 | 19 | POL | 511 | SPFLLAQFTSA | P | A | 11 | 0.0820 | 0.0001 | 0.0001 | −0.0003 | 12.0500 | 1170 |
| 100 | 20 | NUC | 49 | SPHHTALRQA | P | A | 10 | 0.0012 | 0.0001 | | 0.0002 | 0.0035 | 1171 |
| 100 | 20 | NUC | 49 | SPHHTALRQAI | P | I | 11 | 0.5800 | 0.0001 | 0.0004 | 0.0005 | 0.0002 | 1172 |
| 85 | 17 | ENV | 67 | SPQAQGIL | P | L | 8 | | | | | | 1173 |
| 85 | 17 | POL | 808 | SPSVPSHL | P | L | 8 | | | | | | 1174 |
| 75 | 15 | ENV | 350 | SPTVWLSV | P | V | 8 | | | | | | 1175 |
| 75 | 15 | ENV | 350 | SPTVWLSVI | P | I | 9 | | | | | | 1178 |
| 75 | 15 | ENV | 350 | SPTVWLSVIW | P | W | 10 | | | | | | 1177 |
| 75 | 15 | ENV | 350 | SPTVWLSVIWM | P | M | 11 | | | | | | 1178 |
| 95 | 19 | POL | 659 | SPTYKAFL | P | L | 8 | 0.3900 | 0.0001 | 0.0019 | 0.0002 | 0.0002 | 1179 |
| 90 | 18 | POL | 354 | TPARVTGGV | P | V | 9 | 0.0078 | 0.0001 | 0.0013 | 0.0001 | 0.0015 | 1180 |
| 90 | 18 | POL | 354 | TPARVTGGVF | P | F | 10 | 0.3200 | 0.1000 | 0.0001 | 0.0099 | 0.0006 | 1181 |
| 90 | 18 | POL | 354 | TPARVTGGVFL | P | L | 11 | 0.0950 | 0.0001 | 0.0001 | 0.0005 | 0.0005 | 1182 |
| 95 | 19 | NUC | 128 | TPPAYRPPNA | P | A | 10 | 0.0001 | 0.0001 | | 0.0002 | 0.0100 | 1183 |
| 75 | 15 | ENV | 57 | TPPHGGLL | P | L | 8 | | | | | | 1184 |
| 75 | 15 | ENV | 57 | TPPHGGLLGW | P | W | 10 | | | | | | 1185 |
| 80 | 18 | POL | 691 | TPTGWGLA | P | A | 8 | | | | | | 1188 |
| 75 | 15 | POL | 691 | TPTGWGLAI | P | I | 9 | | | | | | 1187 |
| 95 | 19 | ENV | 340 | VPFVQWFV | P | V | 8 | 0.0010 | 0.0001 | 19.0000 | 0.0002 | 0.1100 | 1188 |
| 95 | 19 | ENV | 340 | VPFVQWFVGL | P | L | 10 | 0.0011 | 0.0001 | 0.0100 | 0.0001 | 0.0025 | 1189 |
| 95 | 19 | POL | 398 | VPNLQSLTNL | P | L | 10 | 0.0008 | 0.0001 | 0.0004 | 0.0001 | 0.0002 | 1190 |
| 95 | 19 | POL | 398 | VPNLQSLTNLL | P | L | 11 | 0.0004 | 0.0001 | 0.0001 | −0.0003 | 0.0002 | 1191 |
| 90 | 18 | POL | 769 | VPSALNPA | P | A | 8 | 0.0011 | 0.0001 | 0.0070 | 0.0002 | 1.0000 | 1192 |
| 95 | 19 | POL | 393 | WPKFAVPNL | P | L | 9 | 0.0054 | 0.0002 | 0.0015 | 0.0001 | 0.0015 | 1193 |
| 95 | 19 | POL | 640 | YPALMPLY | P | V | 8 | 0.0004 | 0.2600 | 0.4100 | 0.0450 | 0.0056 | 1194 |
| 95 | 19 | POL | 640 | YPALMPLYA | P | A | 9 | 0.0180 | 0.0480 | 0.0340 | 0.0140 | 16.0000 | 1195 |
| 95 | 19 | POL | 640 | YPALMPLYACI | P | I | 11 | 0.0040 | 0.0001 | 0.0470 | 0.0320 | 0.0700 | 1196 |

[0428] TABLE XII

HBV B27 Super Motif (No binding data available)

| | | | | | | |
|---|---|---|---|---|---|---|
| | | Position in | No. of | Sequence | Conservancy | |
| Protein | Sequence | HBV | Amino Acids | Frequency | (%) | Seq ID Num |

| | | | | | | |
|---|---|---|---|---|---|---|
| | | | | | | 1197 |
| AYW | AHLSLRGL | 51 | 8 | 19 | 95 | 1198 |
| AYW | ARVTGGVF | 356 | 8 | 18 | 90 | 1199 |
| AYW | DHGAHLSL | 48 | 8 | 19 | 95 | 1200 |
| AYW | DHQLDPAF | 16 | 8 | 18 | 90 | 1201 |
| AYW | DKGIKPYY | 128 | 8 | 20 | 100 | 1202 |
| AWY | FHISCLTF | 103 | 8 | 18 | 90 | 1203 |
| AYW | FRKIPMGV | 501 | 8 | 16 | 80 | 1204 |
| AYR | GRETVLEY | 140 | 8 | 15 | 75 | 1205 |
| AYW | HHTALRQA | 51 | 8 | 20 | 100 | 1206 |
| AYW | IHTAELLA | 714 | 8 | 17 | 85 | 1207 |
| AYW | LHKRTLGL | 93 | 8 | 18 | 90 | 1208 |
| AYW | LHLYSHPI | 490 | 8 | 19 | 95 | 1209 |
| AYW | LRGLPVCA | 55 | 8 | 19 | 95 | 1210 |
| AYW | LRGTSFVY | 761 | 8 | 16 | 80 | 1211 |
| AYW | LRQAILCW | 55 | 8 | 19 | 95 | 1212 |
| AYW | LRRFIIFL | 240 | 8 | 19 | 95 | 1213 |
| AYW | NKTKRWGY | 573 | 8 | 15 | 75 | 1214 |
| AYW | NRPIDWKV | 614 | 8 | 18 | 90 | 1215 |
| AYW | NRRVAEDL | 34 | 8 | 17 | 85 | 1218 |
| AYW | PHCLAFSY | 531 | 8 | 19 | 95 | 1217 |
| AYW | PHGGLLGW | 59 | 8 | 17 | 85 | 1218 |
| AYW | PKFAVPNL | 394 | 8 | 19 | 95 | 1219 |
| AYR | QHFRKLLL | 8 | 8 | 15 | 75 | 1220 |
| AYW | RHYLHTLW | 145 | 8 | 20 | 100 | 1221 |
| AYW | RKYTSFPW | 744 | 8 | 17 | 85 | 1222 |
| AYW | RRAFPHCL | 527 | 8 | 19 | 95 | 1223 |
| AYW | RRFIIFLF | 241 | 8 | 15 | 75 | 1224 |
| AYW | SHPIILGF | 494 | 8 | 16 | 80 | 1225 |
| AYW | SKLCLGWL | 20 | 8 | 18 | 90 | 1226 |
| AYW | SRNLYVSL | 472 | 8 | 16 | 80 | 1227 |
| AYW | TKRWGVSL | 575 | 8 | 19 | 95 | 1228 |
| AYW | TRHYLHTL | 144 | 8 | 20 | 100 | 1229 |
| AYW | VRFSWLSL | 331 | 8 | 18 | 80 | 1230 |
| AYW | WKVCQRIV | 619 | 8 | 17 | 85 | 1231 |
| AYW | YRPPNAPI | 132 | 8 | 20 | 100 | 1232 |
| AYW | ARVTGGVFL | 356 | 9 | 18 | 90 | 1233 |
| AYW | EHCSPHHTA | 46 | 9 | 20 | 100 | 1234 |
| AYR | GRETVLEYL | 140 | 9 | 15 | 75 | 1235 |
| AYW | HHTALRQAI | 51 | 9 | 20 | 100 | 1238 |
| AYW | HKVGNFTGL | 54 | 9 | 19 | 95 | 1237 |
| AYW | IHTAELLAA | 714 | 9 | 17 | 85 | 1238 |
| AYW | KRWGYSLNF | 576 | 9 | 17 | 85 | 1239 |
| AYW | LHLYSHPII | 490 | 9 | 18 | 80 | 1240 |
| AYW | LHPAAMPHL | 428 | 9 | 20 | 100 | 1241 |
| AYW | LHTLWKAGI | 148 | 9 | 20 | 100 | 1242 |
| AYR | LKLIMPARF | 107 | 9 | 15 | 75 | 1243 |
| AYW | LRGLPVCAF | 55 | 9 | 19 | 95 | 1244 |
| AYW | LRGTSFVYV | 761 | 9 | 16 | 60 | 1245 |
| AYW | LRRFIIFLF | 240 | 9 | 15 | 75 | 1246 |
| AYW | PHCLAFSYM | 531 | 9 | 19 | 95 | 1247 |
| AYW | PHHTALRQA | 50 | 9 | 20 | 100 | 1248 |
| AYW | PKVLHKRTL | 90 | 9 | 17 | 85 | 1249 |
| AYR | QHFRKLLLL | 6 | 9 | 15 | 75 | 1250 |
| AYW | QRIVGLLGF | 623 | 9 | 18 | 90 | 1251 |
| AYW | RKIPMGVGL | 502 | 9 | 16 | 80 | 1252 |
| AYW | RKLPVNRPI | 609 | 9 | 16 | 80 | 1253 |
| AYW | RKYTSFPWL | 744 | 9 | 17 | 85 | 1254 |
| AYW | RRAFPHCLA | 527 | 9 | 19 | 95 | 1255 |
| AYW | RRFIIFLFI | 241 | 9 | 15 | 75 | 1256 |
| AYR | RRLKLIMPA | 105 | 9 | 15 | 75 | 1257 |
| AYW | RRVAEDLNL | 35 | 9 | 18 | 90 | 1258 |
| AYW | SKLCLGWLW | 20 | 9 | 17 | 85 | 1259 |
| AYW | SRKYTSFPW | 743 | 9 | 17 | 85 | 1260 |
| AYW | TRHYLHTLW | 144 | 9 | 20 | 100 | 1261 |
| AYW | VHFASPLHV | 819 | 9 | 16 | 80 | 1262 |
| AYW | VRFSWLSLL | 331 | 9 | 16 | 80 | 1263 |
| AYW | VRRAFPHCL | 526 | 9 | 19 | 95 | 1264 |
| AYW | YRPPNAPIL | 132 | 9 | 20 | 100 | 1265 |
| AYW | YRWMCLRRF | 235 | 9 | 19 | 95 | 1266 |
| AYW | AHLSLRGLPV | 51 | 10 | 18 | 90 | 1267 |
| AYW | AKSVQHLESL | 546 | 10 | 17 | 85 | 1268 |
| AYW | ARDVLCLRPV | 12 | 10 | 15 | 75 | 1289 |
| AYW | ARVTGGVFLV | 356 | 10 | 18 | 90 | 1270 |
| AYW | EHCSPHHTAL | 46 | 10 | 20 | 100 | 1271 |
| AYW | FRKIPMGVGL | 501 | 10 | 16 | 80 | 1272 |
| AYW | FRKLPVNRPI | 608 | 10 | 16 | 80 | 1273 |
| AYR | GRETVLEYL | 140 | 10 | 15 | 75 | 1274 |
| AYW | HHTALRQAIL | 51 | 10 | 19 | 95 | 1275 |
| AYW | HKVGNFTGLY | 54 | 10 | 19 | 95 | 1276 |
| AYW | KRWGYSLNFM | 576 | 10 | 17 | 85 | 1277 |
| AYW | LHLYSHPIIL | 490 | 10 | 16 | 80 | 1278 |
| AYW | LHPAAMPHLL | 428 | 10 | 20 | 100 | 1279 |
| AYW | LHTLWKAGIL | 148 | 10 | 20 | 100 | 1280 |
| AYR | LKLIMPARFY | 107 | 10 | 15 | 75 | 1281 |
| AYW | LRRFIIFLFI | 240 | 10 | 15 | 75 | 1282 |
| AYW | NKTKRWGYSL | 573 | 10 | 15 | 75 | 1283 |
| AYW | NRRVAEDLNL | 34 | 10 | 17 | 85 | 1284 |
| AYW | PHHTALRQAI | 50 | 10 | 20 | 100 | 1285 |
| AYW | PHLLVGSSGL | 434 | 10 | 16 | 80 | 1286 |
| AYW | QRIVGLLGFA | 623 | 10 | 18 | 90 | 1287 |
| AYW | RHYLHTLWKA | 145 | 10 | 20 | 100 | 1288 |
| AYW | RKYTSFPWLL | 744 | 10 | 17 | 85 | 1289 |
| AYW | RRAFPHCLAF | 527 | 10 | 19 | 95 | 1290 |
| AYW | RRFIIFLFIL | 241 | 10 | 15 | 75 | 1291 |
| AYW | SRKYTSFPWL | 743 | 10 | 17 | 85 | 1292 |
| AYW | SRLVVDFSQF | 375 | 10 | 19 | 95 | 1293 |
| AYW | THKVGNFTGL | 53 | 10 | 19 | 95 | 1294 |
| AYW | TKRWGYSLNF | 575 | 10 | 17 | 85 | 1295 |
| AYW | TKYLPLDKGI | 120 | 10 | 20 | 100 | 1296 |
| AYW | TRILTIPQSL | 186 | 10 | 18 | 80 | 1297 |
| AYW | VHFASPLHVA | 819 | 10 | 16 | 80 | 1298 |
| AYW | VRFSWLSLLV | 331 | 10 | 16 | 80 | 1299 |
| AYW | VRRAFPHCLA | 526 | 10 | 19 | 95 | 1300 |
| AYW | WKVCQRIVGL | 619 | 10 | 17 | 85 | 1301 |
| AYW | YRWMCLRRFI | 235 | 10 | 19 | 95 | 1302 |
| AYW | DHGAHLSLRGL | 48 | 11 | 19 | 95 | 1303 |
| AYW | IHLNPNKTKRW | 568 | 11 | 15 | 75 | 1304 |
| AYW | IHTAELLAACF | 714 | 11 | 17 | 85 | 1305 |
| AYW | LHPAAMPHLLV | 428 | 11 | 17 | 85 | 1306 |
| AYW | LHTLWKAGILY | 148 | 11 | 20 | 100 | 1307 |
| AYW | LRQAILCWGEL | 55 | 11 | 18 | 90 | 1308 |
| AYW | LRRFIIFLFIL | 240 | 11 | 15 | 75 | 1309 |
| AYW | PHHTALRQAIL | 50 | 11 | 19 | 95 | 1310 |
| AYW | PKFAVPNLQSL | 394 | 11 | 19 | 95 | 1311 |
| AYW | PKVLHKRTLGL | 90 | 11 | 17 | 85 | 1312 |
| AYW | PRTPARVTGGV | 352 | 11 | 18 | 90 | 1313 |
| AYW | QRIVGLLGFAA | 623 | 11 | 18 | 90 | 1314 |
| AYW | RKLPVNRPIDW | 809 | 11 | 16 | 80 | 1315 |
| AYW | RRFIIFLFILL | 241 | 11 | 15 | 75 | 1316 |
| AYR | RRLKLIMPARF | 105 | 11 | 15 | 75 | 1317 |
| AYW | SHPIILGFRKI | 494 | 11 | 16 | 80 | 1318 |
| AYW | SKLCLGWLWGM | 20 | 11 | 17 | 85 | 1319 |
| AYW | SRKYTSFPWLL | 743 | 11 | 17 | 85 | 1320 |
| AYW | THKVGNFTGLY | 53 | 11 | 19 | 95 | 1321 |
| AYW | TKRWGYSLNFM | 575 | 11 | 17 | 85 | 1322 |
| AYW | TRHYLHTLWKA | 144 | 11 | 20 | 100 | 1323 |
| AYW | VHFASPLHVAW | 819 | 11 | 16 | 80 | 1324 |
| AYW | VRRAFPHCLAF | 526 | 11 | 19 | 95 | 1325 |
| AYW | WKVCQRIVGLL | 619 | 11 | 17 | 85 | 1326 |
| AYW | YRWMCLRRFII | 235 | 11 | 19 | 95 | 1327 |
| POL | AAMPHLLV | 431 | 8 | 17 | 85 | 1328 |
| NUC | ASALYREA | 34 | 8 | 17 | 85 | 1329 |
| POL | ASFCGSPY | 166 | 8 | 20 | 100 | 1330 |
| NUC | ASKLCLGW | 19 | 8 | 18 | 90 | 1331 |
| POL | ASPLHVAW | 822 | 8 | 16 | 80 | 1332 |
| ENV | ASVRFSWL | 329 | 8 | 16 | 80 | 1333 |
| POL | ATPTGWGL | 690 | 8 | 19 | 95 | 1334 |
| X | CALRFTSA | 69 | 8 | 18 | 90 | 1335 |
| NUC | CSPHHTAL | 48 | 8 | 20 | 100 | 1336 |
| POL | CSVVRRAF | 523 | 8 | 19 | 95 | 1337 |
| POL | ESRLVVDF | 374 | 8 | 19 | 95 | 1338 |
| NUC | ETVLEYLV | 142 | 8 | 15 | 75 | 1339 |
| POL | FARSRSGA | 724 | 8 | 17 | 85 | 1340 |
| POL | FASPLHVA | 821 | 8 | 16 | 80 | 1341 |
| POL | FSPTYKAF | 658 | 8 | 19 | 95 | 1342 |
| X | FSSAGPCA | 63 | 8 | 19 | 95 | 1343 |
| ENV | FSWLSLLV | 333 | 8 | 20 | 100 | 1344 |
| POL | FSYMDDW | 536 | 8 | 18 | 90 | 1345 |
| POL | FTQCGYPA | 635 | 8 | 19 | 95 | 1346 |
| POL | FTSAICSV | 518 | 8 | 19 | 95 | 1347 |
| POL | GAKSVQHL | 545 | 8 | 17 | 85 | 1348 |
| POL | GTDNSVVL | 735 | 8 | 18 | 90 | 1349 |
| POL | HTAELLAA | 715 | 8 | 17 | 85 | 1350 |
| NUC | HTALRQAI | 52 | 8 | 20 | 100 | 1351 |
| POL | HTLWKAGI | 149 | 8 | 20 | 100 | 1352 |
| POL | LAQFTSAI | 515 | 8 | 19 | 95 | 1353 |
| NUC | LSFLPSDF | 45 | 8 | 19 | 95 | 1354 |
| POL | LSLDVSAA | 415 | 8 | 19 | 95 | 1355 |
| ENV | LSLLVPFV | 338 | 8 | 20 | 100 | 1356 |
| X | LSLRGLPV | 53 | 8 | 19 | 95 | 1357 |
| POL | LSRKYTSF | 742 | 8 | 17 | 85 | 1358 |
| POL | LSSNLSWL | 408 | 8 | 18 | 90 | 1359 |
| POL | LSWLSLDV | 412 | 8 | 20 | 100 | 1360 |
| NUC | LTFGRETV | 108 | 8 | 19 | 95 | 1361 |
| X | MSTTDLEA | 103 | 8 | 18 | 80 | 1362 |
| NUC | NAPILSTL | 138 | 8 | 20 | 100 | 1363 |
| POL | PAAMPHLL | 430 | 8 | 20 | 100 | 1364 |
| POL | PALMPLYA | 641 | 8 | 19 | 95 | 1365 |
| X | PARDVLCL | 11 | 8 | 16 | 80 | 1366 |
| POL | PARVTGGV | 355 | 8 | 18 | 90 | 1367 |
| NUC | PAYRPPNA | 130 | 8 | 19 | 95 | 1368 |
| POL | PSRGRLGL | 779 | 8 | 18 | 90 | 1369 |
| POL | PTGWGLAI | 692 | 8 | 15 | 75 | 1370 |
| POL | PTTGRTSL | 797 | 8 | 17 | 85 | 1371 |
| NUC | PTVQASKL | 15 | 8 | 18 | 80 | 1372 |
| ENV | PTVWLSVI | 351 | 8 | 15 | 75 | 1373 |
| POL | RAFPHCLA | 528 | 8 | 19 | 95 | 1374 |
| X | RTLGLSAM | 96 | 8 | 24 | 120 | 1375 |
| NUC | SALYREAL | 35 | 8 | 18 | 90 | 1376 |
| X | SSAGPCAL | 64 | 8 | 19 | 95 | 1377 |
| ENV | SSGTVNPV | 136 | 8 | 15 | 75 | 1378 |
| ENV | SSKPRQGM | 5 | 8 | 18 | 90 | 1379 |
| ENV | STLPETTV | 141 | 8 | 20 | 100 | 1380 |
| X | STTDLEAY | 104 | 8 | 15 | 75 | 1381 |
| NUC | TALRQAIL | 53 | 8 | 19 | 95 | 1382 |
| POL | TSAICSVV | 519 | 8 | 19 | 95 | 1383 |
| ENV | TSGFLGPL | 168 | 8 | 16 | 80 | 1384 |
| X | TTDLEAYF | 105 | 8 | 15 | 75 | 1385 |
| POL | TTGRTSLY | 798 | 8 | 17 | 85 | 1386 |
| POL | VSWPKFAV | 391 | 8 | 19 | 95 | 1387 |
| NUC | VSYVNVNM | 115 | 8 | 20 | 100 | 1388 |
| POL | VTGGVFLV | 358 | 8 | 20 | 100 | 1389 |
| ENV | WSPQAQGI | 66 | 8 | 17 | 85 | 1390 |
| POL | WTHKVGNF | 52 | 8 | 20 | 100 | 1391 |
| POL | YSLNFMGY | 580 | 8 | 17 | 85 | 1392 |
| POL | YTSFPWLL | 748 | 8 | 17 | 85 | 1393 |
| POL | AAPFTQCGY | 632 | 9 | 19 | 95 | 1394 |
| NUC | ASALYREAL | 34 | 9 | 17 | 85 | 1395 |
| NUC | ASKLCLGWL | 19 | 9 | 18 | 90 | 1396 |
| POL | ATPTGWGLA | 690 | 9 | 16 | 80 | 1397 |
| POL | CSRNLYVSL | 471 | 9 | 18 | 80 | 1398 |
| POL | DATPTGWGL | 689 | 9 | 19 | 95 | 1399 |
| ENV | DSWWTSLNF | 196 | 9 | 19 | 95 | 1400 |
| POL | EAGPLEEEL | 17 | 9 | 20 | 100 | 1401 |
| POL | FADATPTGW | 687 | 9 | 19 | 95 | 1402 |
| POL | FASPLHVAW | 821 | 9 | 16 | 80 | 1403 |
| POL | FAVPNLQSL | 396 | 9 | 19 | 95 | 1404 |
| POL | FSPTYKAFL | 658 | 9 | 19 | 95 | 1405 |
| X | FSSAGPCAL | 63 | 9 | 19 | 95 | 1406 |
| POL | FSYMDDVVL | 536 | 9 | 18 | 90 | 1407 |
| POL | FTFSPTYKA | 656 | 9 | 19 | 95 | 1408 |
| POL | FTGLYSSTV | 59 | 9 | 18 | 90 | 1409 |
| POL | FTQCGYPAL | 635 | 9 | 19 | 95 | 1410 |
| POL | FTSAICSVV | 518 | 9 | 19 | 95 | 1411 |
| X | GAHLSLRGL | 50 | 9 | 19 | 95 | 1412 |
| NUC | HTALRQAIL | 52 | 9 | 19 | 95 | 1413 |
| POL | HTLWKAGIL | 149 | 9 | 20 | 100 | 1414 |
| POL | KSVQHLESL | 547 | 9 | 17 | 85 | 1415 |
| POL | KTKRWGYSL | 574 | 9 | 19 | 95 | 1416 |
| POL | LAFSYMDDV | 534 | 9 | 18 | 90 | 1417 |
| NUC | LSFLPSDFF | 45 | 9 | 19 | 95 | 1418 |
| POL | LSLDVSAAF | 415 | 9 | 19 | 95 | 1419 |
| POL | LSPFLLAQF | 510 | 9 | 19 | 95 | 1420 |
| ENV | LSPTVWLSV | 349 | 9 | 15 | 75 | 1421 |
| NUC | LSTLPETTV | 140 | 9 | 20 | 100 | 1422 |
| ENV | LSVPNPLGF | 16 | 9 | 15 | 75 | 1423 |
| POL | LSYQHFRKL | 3 | 9 | 15 | 75 | 1424 |
| NUC | LTFGRETVL | 137 | 9 | 15 | 75 | 1425 |
| POL | LTNLLSSNL | 404 | 9 | 18 | 90 | 1426 |
| POL | LTVNEKRRL | 99 | 9 | 17 | 85 | 1427 |
| X | MSTTDLEAY | 103 | 9 | 15 | 75 | 1428 |
| POL | NSVVLSRKY | 738 | 9 | 18 | 90 | 1429 |
| POL | PAAMPHLLV | 430 | 9 | 17 | 85 | 1430 |
| POL | PARVTGGVF | 355 | 9 | 18 | 90 | 1431 |
| POL | PTTGRTSLY | 797 | 9 | 17 | 85 | 1432 |
| ENV | PTVWLSVIW | 351 | 9 | 15 | 75 | 1433 |
| POL | QAFTFSPTY | 654 | 9 | 19 | 95 | 1434 |
| NUC | QALCWGEL | 57 | 9 | 18 | 90 | 1435 |
| NUC | QASKLCLGW | 18 | 9 | 18 | 80 | 1436 |
| POL | RAFPHCLAF | 528 | 9 | 19 | 95 | 1437 |
| ENV | RTGDPAPNM | 167 | 9 | 16 | 80 | 1438 |
| X | SAGPCALRF | 65 | 9 | 18 | 90 | 1439 |
| POL | SASFCGSPY | 165 | 9 | 20 | 100 | 1440 |
| POL | SSNLSWLSL | 409 | 9 | 18 | 90 | 1441 |
| ENV | SSSGTVNPV | 135 | 9 | 15 | 75 | 1442 |
| NUC | STLPETTVV | 141 | 9 | 20 | 100 | 1443 |
| X | STTDLEAYF | 104 | 9 | 15 | 75 | 1444 |
| POL | TAELLAACF | 716 | 9 | 17 | 85 | 1445 |
| NUC | TASALYREA | 33 | 9 | 16 | 80 | 1446 |
| POL | TSFVYVPSA | 764 | 9 | 16 | 80 | 1447 |
| ENV | TSGFLGPLL | 168 | 9 | 15 | 75 | 1448 |
| POL | TTGRTSLYA | 798 | 9 | 17 | 85 | 1449 |
| POL | VSIPWTHKV | 48 | 9 | 20 | 100 | 1450 |
| ENV | WSPQAQGIL | 66 | 9 | 17 | 85 | 1451 |
| ENV | WSSKPRQGM | 4 | 9 | 18 | 90 | 1452 |
| POL | YSHPIILGF | 493 | 9 | 16 | 80 | 1453 |
| POL | YSLNFMGYV | 580 | 9 | 15 | 75 | 1454 |
| POL | ASFCGSPYSW | 166 | 10 | 20 | 100 | 1455 |
| NUC | ASKLCLGWLW | 19 | 10 | 17 | 65 | 1456 |
| ENV | ASVRFSWLSL | 329 | 10 | 16 | 80 | 1457 |
| POL | ATPTGWGLAI | 690 | 10 | 15 | 75 | 1458 |
| X | CAFSSAGPCA | 61 | 10 | 19 | 95 | 1459 |
| ENV | CTCIPIPSSW | 310 | 10 | 20 | 100 | 1460 |
| ENV | CTIPAQGTSM | 298 | 10 | 16 | 80 | 1461 |
| POL | DATPTGWGLA | 689 | 10 | 16 | 80 | 1462 |
| ENV | DSWWTSLNFL | 196 | 10 | 18 | 90 | 1463 |
| NUC | DTASALYREA | 32 | 10 | 16 | 80 | 1464 |
| POL | FAAPFTQCGY | 6311 | 10 | 19 | 95 | 1465 |
| ENV | FSWLSLLVPF | 333 | 10 | 20 | 100 | 1468 |
| POL | FTFSPTYKAF | 658 | 10 | 19 | 95 | 1467 |
| POL | FTQCGYPALM | 635 | 10 | 38 | 190 | 1468 |
| ENV | GSSSGTVNPV | 134 | 10 | 15 | 75 | 1469 |
| ENV | GTNLSVPNPL | 13 | 10 | 15 | 75 | 1470 |
| POL | GTSFVYVPSA | 763 | 10 | 16 | 80 | 1471 |
| POL | HTAELLAACF | 715 | 10 | 17 | 85 | 1472 |
| POL | HTLWKAGILY | 149 | 10 | 20 | 100 | 1473 |
| POL | LAFSYMDDVV | 534 | 10 | 18 | 90 | 1474 |
| POL | LSLDVSAAFY | 415 | 10 | 19 | 95 | 1475 |
| ENV | LSLLVPFVQW | 336 | 10 | 20 | 100 | 1476 |
| X | LSLRGLPVCA | 53 | 10 | 19 | 95 | 1477 |
| ENV | LSPTVWLSVI | 349 | 10 | 15 | 75 | 1478 |
| POL | LSRKYTSFPW | 742 | 10 | 17 | 85 | 1479 |
| POL | LSSNLSWLSL | 408 | 10 | 18 | 90 | 1480 |
| NUC | LSTLPETTVV | 140 | 10 | 20 | 100 | 1481 |
| POL | LSWLSLDVSA | 412 | 10 | 20 | 100 | 1482 |
| POL | LSYQHFRKLL | 3 | 10 | 15 | 75 | 1483 |
| ENV | LTIPQSLDSW | 189 | 10 | 18 | 90 | 1484 |
| X | MSTTDLEAYF | 103 | 10 | 15 | 75 | 1485 |
| POL | PADDPSRGRL | 775 | 10 | 18 | 90 | 1486 |
| ENV | PAGGSSSGTV | 131 | 10 | 18 | 90 | 1487 |
| POL | PALMPLYACI | 641 | 10 | 19 | 95 | 1488 |
| X | PAPCNFFTSA | 145 | 10 | 15 | 75 | 1489 |
| POL | PARVTGGVFL | 355 | 10 | 18 | 90 | 1490 |
| NUC | PAYRPPNAPI | 130 | 10 | 19 | 95 | 1491 |
| POL | PTTGRTSLYA | 797 | 10 | 17 | 85 | 1492 |
| NUC | PTVQASKLCL | 15 | 10 | 16 | 80 | 1493 |
| ENV | PTVWLSVIWM | 351 | 10 | 30 | 150 | 1494 |
| ENV | QAGFFLLTRI | 179 | 10 | 16 | 80 | 1495 |
| NUC | QAILCWGELM | 57 | 10 | 36 | 180 | 1496 |
| ENV | QAMQWNSTTF | 107 | 10 | 16 | 80 | 1497 |
| NUC | QASKLCLGWL | 18 | 10 | 16 | 80 | 1498 |
| ENV | QSLDSWWTSL | 193 | 10 | 18 | 90 | 1499 |
| POL | RTPARVTGGV | 353 | 10 | 18 | 90 | 1500 |
| POL | SAICSVVRRA | 520 | 10 | 19 | 95 | 1501 |
| X | SSAGPCALRF | 64 | 10 | 18 | 90 | 1502 |
| POL | TAELLAACFA | 716 | 10 | 17 | 85 | 1503 |
| NUC | TALRQAILCW | 53 | 10 | 19 | 95 | 1504 |
| NUC | TASALYREAL | 33 | 10 | 16 | 80 | 1505 |
| POL | TSFPWLLGCA | 747 | 10 | 15 | 75 | 1506 |
| POL | TSFVYVPSAL | 764 | 10 | 16 | 80 | 1507 |
| ENV | TSGFLGPLLV | 168 | 10 | 15 | 75 | 1508 |
| POL | VAEDLNLGNL | 37 | 10 | 19 | 95 | 1509 |
| POL | YSLNFMGYVI | 580 | 10 | 15 | 75 | 1510 |
| POL | AACFARSRSGA | 721 | 11 | 17 | 85 | 1511 |
| POL | AAPFTQCGYPA | 632 | 11 | 19 | 95 | 1512 |
| ENV | ASVRFSWLSLL | 329 | 11 | 16 | 60 | 1513 |
| X | CAFSSAGPCAL | 61 | 11 | 19 | 95 | 1514 |
| X | CALRFTSARRM | 69 | 11 | 26 | 130 | 1515 |
| NUC | CSPHHTALRQA | 48 | 11 | 20 | 100 | 1516 |
| ENV | CTCIPIPSSWA | 310 | 11 | 20 | 100 | 1517 |
| POL | DATPTGWGLAI | 689 | 11 | 15 | 75 | 1518 |
| NUC | DTASALYREAL | 32 | 11 | 16 | 80 | 1519 |
| POL | ESRLVVDFSQF | 374 | 11 | 19 | 95 | 1520 |
| POL | FADATPTGWGL | 687 | 11 | 19 | 95 | 1521 |
| X | FSSAGPCALRF | 63 | 11 | 18 | 90 | 1522 |
| ENV | FSWLSLLVPFV | 333 | 11 | 20 | 100 | 1523 |
| POL | FSYMDDVVLGA | 536 | 11 | 18 | 90 | 1524 |
| POL | FTFSPTYKAFL | 656 | 11 | 19 | 95 | 1525 |
| X | GAHLSLRGLPV | 50 | 11 | 18 | 90 | 1526 |
| POL | GAKSVQHLESL | 545 | 11 | 17 | 85 | 1527 |
| POL | GTSFVYVPSAL | 763 | 11 | 16 | 80 | 1528 |
| POL | HTAELLAACFA | 715 | 11 | 17 | 85 | 1529 |
| NUC | HTALRQAILCW | 52 | 11 | 19 | 95 | 1530 |
| NUC | ISCLTFGRETV | 105 | 11 | 18 | 90 | 1531 |
| POL | KTKRWGYSLNF | 574 | 11 | 17 | 85 | 1532 |
| POL | LAFSYMDDVVL | 534 | 11 | 18 | 90 | 1533 |
| POL | LAQFTSAICSV | 515 | 11 | 19 | 95 | 1534 |
| ENV | LSLLVPFVQWF | 336 | 11 | 20 | 100 | 1535 |
| X | LSLRGLPVCAF | 53 | 11 | 19 | 95 | 1536 |
| ENV | LSPTVWLSVIW | 349 | 11 | 15 | 75 | 1537 |
| POL | LSRKYTSFPWL | 742 | 11 | 17 | 85 | 1538 |
| POL | LSWLSLDVSAA | 412 | 11 | 19 | 95 | 1539 |
| POL | LSYQHFRKLLL | 3 | 11 | 15 | 75 | 1540 |
| NUC | LTFGRETVLEY | 137 | 11 | 15 | 75 | 1541 |
| ENV | LTIPQSLDSWW | 189 | 11 | 18 | 90 | 1542 |
| POL | LTNLLSSNLSW | 404 | 11 | 18 | 90 | 1543 |
| ENV | LTRILTIPQSL | 185 | 11 | 16 | 80 | 1544 |
| X | PARDVLCLRPV | 11 | 11 | 15 | 75 | 1545 |
| POL | PARVTGGVFLV | 355 | 11 | 18 | 90 | 1546 |
| NUC | PAYRPPNAPIL | 139 | 11 | 19 | 95 | 1547 |
| ENV | PTVWLSVIWMM | 351 | 11 | 28 | 140 | 548 |
| POL | QAFTFSPTYKA | 654 | 11 | 19 | 95 | 1549 |
| ENV | QAGFFLLTRIL | 179 | 11 | 16 | 80 | 1550 |
| NUC | QASLCLGWLW | 18 | 11 | 15 | 75 | 1551 |
| POL | QSLTNLLSSNL | 402 | 11 | 18 | 90 | 1552 |
| POL | RAFPHCLAFSY | 528 | 11 | 19 | 95 | 1553 |
| POL | RTPARVTGGVF | 353 | 11 | 18 | 90 | 1554 |
| NUC | RTPPAYRPPNA | 127 | 11 | 19 | 95 | 1555 |
| POL | SAICSVVRRAF | 520 | 11 | 19 | 95 | 1556 |
| POL | SASFCGSPYSW | 165 | 11 | 20 | 100 | 1557 |
| POL | SSNLSWLSLDV | 409 | 11 | 18 | 90 | 1558 |
| POL | TSAICSWRRA | 519 | 11 | 19 | 95 | 1559 |
| POL | TSFPWLLGCAA | 747 | 11 | 15 | 75 | 1560 |
| ENV | TSGFLGPLLVL | 168 | 11 | 15 | 75 | 1561 |
| POL | VSWPKFAVPNL | 391 | 11 | 19 | 95 | 1562 |
| POL | WTHKVGNFTGL | 52 | 11 | 19 | 95 | 1563 |
| POL | YTSFPWLLGCA | 746 | 11 | 15 | 75 | 1564 |

[0429] TABLE XIV

HBV B62 Super Motif

| | | | | | | |
|---|---|---|---|---|---|---|
| | | | No. of | Sequence | Conservancy | |
| Protein | Sequence | Position | Amino Acids | Frequency | (%) | SEQ IN NO: |

| | | | | | | |
|---|---|---|---|---|---|---|
| NUC | AILCWGEL | 58 | 8 | 18 | 90 | 1585 |
| POL | APFTQCGY | 633 | 8 | 19 | 95 | 1566 |
| POL | AVPNLQStL | 397 | 8 | 19 | 95 | 1567 |
| ENV | CIPIPSSW | 312 | 8 | 20 | 100 | 1568 |
| NUC | CLGWLWGM | 23 | 8 | 17 | 85 | 1569 |
| ENV | CLIFLLVL | 253 | 8 | 20 | 100 | 1570 |
| ENV | CLRRFIIF | 239 | 8 | 19 | 95 | 1571 |
| POL | CORVGLL | 622 | 8 | 17 | 85 | 1572 |
| NUC | DIDPYKEF | 31 | 8 | 18 | 90 | 1573 |
| NUC | DLLDTASA | 29 | 8 | 17 | 85 | 1574 |
| ENV | DPRVRGLY | 122 | 8 | 16 | 80 | 1575 |
| NUC | DPYKEFGA | 33 | 8 | 18 | 90 | 1576 |
| X | DVLCLRPV | 14 | 8 | 19 | 95 | 1577 |
| X | ELGEERL | 122 | 8 | 16 | 80 | 1578 |
| POL | ELLAACFA | 718 | 8 | 18 | 90 | 1579 |
| ENV | FIIFLFIL | 243 | 8 | 16 | 80 | 1560 |
| ENV | FILLLCLI | 248 | 8 | 16 | 80 | 1581 |
| ENV | FLGPLLVL | 171 | 8 | 15 | 75 | 1582 |
| ENV | FLLVLLDY | 256 | 8 | 19 | 95 | 1583 |
| POL | FPWLLGCA | 749 | 8 | 15 | 75 | 1584 |
| ENV | FVGLSPTV | 348 | 8 | 19 | 95 | 1585 |
| ENV | FVQWFVGL | 342 | 8 | 19 | 95 | 1586 |
| POL | FVYVPSAL | 768 | 8 | 18 | 90 | 1587 |
| POL | GLSPFLLA | 509 | 8 | 19 | 95 | 1588 |
| ENV | GLSPTVWL | 348 | 8 | 20 | 100 | 1589 |
| ENV | GMLPVCPL | 265 | 8 | 18 | 90 | 1590 |
| ENV | GPLLVLQA | 173 | 8 | 19 | 95 | 1591 |
| POL | GVGLSPFL | 507 | 8 | 16 | 80 | 1592 |
| POL | HLYSHPII | 491 | 8 | 16 | 80 | 1593 |
| POL | HPAAMPHL | 429 | 8 | 20 | 100 | 1594 |
| ENV | IIFLFILL | 244 | 8 | 16 | 80 | 1595 |
| POL | IILGFRKI | 497 | 8 | 16 | 80 | 1596 |
| NUC | LCWGELM | 59 | 8 | 18 | 90 | 1597 |
| ENV | ILLLCLIF | 249 | 8 | 20 | 100 | 1598 |
| POL | ILRGTSFV | 760 | 8 | 16 | 80 | 1599 |
| ENV | ILTIPQSL | 188 | 8 | 19 | 95 | 1600 |
| ENV | IPIPSSWA | 313 | 8 | 20 | 100 | 1601 |
| ENV | IPQSLDSW | 191 | 8 | 18 | 90 | 1602 |
| ENV | IPSSWAFA | 315 | 8 | 16 | 80 | 1603 |
| POL | IVGLLGFA | 625 | 8 | 18 | 90 | 1604 |
| POL | KIPMGVGL | 503 | 8 | 16 | 80 | 1805 |
| NUC | KLCLGWLW | 21 | 8 | 17 | 85 | 1806 |
| POL | KUMPARF | 108 | 8 | 15 | 75 | 1607 |
| POL | KLPVNRPI | 610 | 8 | 16 | 80 | 1608 |
| POL | KVGNFTGL | 55 | 8 | 19 | 95 | 1609 |
| X | KVLHKRTL | 91 | 8 | 17 | 85 | 1610 |
| ENV | LIFLLVLL | 254 | 8 | 20 | 100 | 1611 |
| POL | LIMPARFY | 109 | 8 | 20 | 100 | 1612 |
| POL | LLAQFTSA | 514 | 8 | 19 | 95 | 1813 |
| ENV | LLCLFLL | 251 | 8 | 20 | 100 | 1614 |
| NUC | LLDTASAL | 30 | 8 | 17 | 85 | 1615 |
| ENV | LLDYQGML | 260 | 8 | 19 | 95 | 1616 |
| POL | LLGCAANW | 752 | 8 | 16 | 80 | 1617 |
| POL | LLGFAAPF | 628 | 8 | 19 | 95 | 1618 |
| ENV | LLGWSPQA | 63 | 8 | 17 | 85 | 1619 |
| ENV | LLLCLIFL | 250 | 8 | 20 | 100 | 1620 |
| ENV | LLPIFFCL | 378 | 8 | 20 | 100 | 1621 |
| POL | LLSLGIHL | 563 | 8 | 19 | 95 | 1622 |
| POL | LLSSNLSW | 407 | 8 | 18 | 90 | 1623 |
| ENV | LLTRILTI | 184 | 8 | 16 | 80 | 1624 |
| POL | LLVGSSGL | 436 | 8 | 18 | 80 | 1625 |
| ENV | LLVLQAGF | 175 | 8 | 19 | 95 | 1626 |
| ENV | LLVPFVQW | 338 | 8 | 20 | 100 | 1627 |
| POL | LMPLYACI | 643 | 8 | 19 | 95 | 1628 |
| ENV | LPIFFCLW | 379 | 8 | 20 | 100 | 1629 |
| POL | LPIHTAEL | 712 | 8 | 17 | 85 | 1630 |
| ENV | LQAGFFLL | 178 | 8 | 19 | 95 | 1631 |
| POL | LQSLTNLL | 401 | 8 | 20 | 100 | 1632 |
| ENV | LVLQAGFF | 176 | 8 | 19 | 95 | 1633 |
| ENV | LVPFVQWF | 339 | 8 | 20 | 100 | 1634 |
| NUC | LVSFGVWI | 119 | 8 | 18 | 90 | 1635 |
| POL | LVVDFSQF | 377 | 8 | 20 | 100 | 1636 |
| POL | MPLSYQHF | 1 | 8 | 20 | 100 | 1637 |
| NUC | MQLGHLCL | 1 | 8 | 15 | 75 | 1638 |
| ENV | MQWNSTTF | 109 | 8 | 16 | 80 | 1639 |
| POL | NLNVSIPW | 45 | 8 | 19 | 95 | 1640 |
| POL | NLQSLTNL | 400 | 8 | 20 | 100 | 1641 |
| ENV | NLSVPNPL | 15 | 8 | 15 | 75 | 1642 |
| POL | NPNKTKRW | 571 | 8 | 15 | 75 | 1643 |
| ENV | PIFFCLWV | 380 | 8 | 20 | 100 | 1644 |
| POL | PIHTAELL | 713 | 8 | 17 | 85 | 1645 |
| ENV | PIPSSWAF | 314 | 8 | 20 | 100 | 1646 |
| ENV | PQSLDWW | 192 | 8 | 18 | 90 | 1647 |
| X | PVCAFSSA | 59 | 8 | 19 | 95 | 1648 |
| POL | PVNRPIDW | 612 | 8 | 17 | 85 | 1649 |
| X | QLDPARDV | 8 | 8 | 16 | 80 | 1650 |
| POL | RIVGLLGF | 624 | 8 | 18 | 90 | 1651 |
| POL | RLKLIMPA | 106 | 8 | 15 | 75 | 1652 |
| NUC | RPPNAPIL | 133 | 8 | 20 | 100 | 1653 |
| NUC | RQLWFHI | 98 | 8 | 18 | 90 | 1654 |
| POL | RVAEDLNL | 36 | 8 | 19 | 95 | 1655 |
| POL | RVHFASPL | 818 | 8 | 16 | 80 | 1656 |
| POL | RVTGGVFL | 357 | 8 | 20 | 100 | 1657 |
| POL | SIPWTHKV | 49 | 8 | 20 | 100 | 1658 |
| POL | SLDVSAAF | 416 | 8 | 19 | 95 | 1659 |
| POL | SLNFMGYV | 581 | 8 | 15 | 75 | 1660 |
| POL | SPFLLAQF | 511 | 8 | 19 | 95 | 1661 |
| ENV | SPQAQGIL | 67 | 8 | 17 | 85 | 1662 |
| POL | SPSVPSHL | 808 | 8 | 17 | 85 | 1663 |
| ENV | SPTVWLSV | 350 | 8 | 15 | 75 | 1664 |
| POL | SPTYKAFL | 659 | 8 | 19 | 95 | 1665 |
| ENV | SVPNPLGF | 17 | 8 | 15 | 75 | 1666 |
| POL | SVQHLESL | 548 | 8 | 17 | 85 | 1667 |
| POL | SVVLSRKY | 739 | 8 | 18 | 90 | 1668 |
| NUC | TLPETTVV | 142 | 8 | 20 | 100 | 1669 |
| POL | TLWKAGIL | 150 | 8 | 20 | 100 | 1670 |
| ENV | TPPHGGL | 57 | 8 | 15 | 75 | 1671 |
| POL | TPTGWGLA | 691 | 8 | 16 | 80 | 1672 |
| POL | TQCGYPAL | 638 | 8 | 19 | 95 | 1673 |
| POL | TVNEKRRL | 100 | 8 | 17 | 85 | 1674 |
| ENV | TVWLSVTW | 352 | 8 | 15 | 75 | 1675 |
| ENV | VLLDYQGM | 259 | 8 | 19 | 95 | 1676 |
| ENV | VLQAGFFL | 177 | 8 | 19 | 95 | 1677 |
| ENV | VPFVQMFV | 340 | 8 | 19 | 95 | 1678 |
| POL | VPSALNPA | 769 | 8 | 18 | 90 | 1679 |
| NUC | VQASKLCL | 17 | 8 | 16 | 80 | 1680 |
| POL | WLGAKSV | 542 | 8 | 18 | 90 | 1681 |
| POL | WILRGTSF | 759 | 8 | 16 | 80 | 1682 |
| NUC | WIRTPPAY | 125 | 8 | 19 | 95 | 1683 |
| POL | WLSLDVSA | 414 | 8 | 20 | 100 | 1664 |
| ENV | WLSLLVPF | 335 | 8 | 20 | 100 | 1685 |
| ENV | WMCLRRFI | 237 | 8 | 19 | 95 | 1686 |
| POL | YLHTLWKA | 147 | 8 | 20 | 100 | 1687 |
| POL | YLPLDKGI | 122 | 8 | 20 | 100 | 1688 |
| NUC | YLVSFGVW | 118 | 8 | 18 | 90 | 1689 |
| POL | YPALMPLY | 640 | 8 | 19 | 95 | 1690 |
| POL | YQHFRKLL | 5 | 8 | 15 | 75 | 1691 |
| POL | AICSVVRRA | 521 | 9 | 19 | 95 | 1692 |
| NUC | AILCWGELM | 58 | 9 | 18 | 90 | 1693 |
| POL | ALMPLYACI | 642 | 9 | 19 | 95 | 1694 |
| NUC | ALRQAILCW | 54 | 9 | 19 | 95 | 1695 |
| ENV | AMQWNSTTF | 108 | 9 | 16 | 80 | 1696 |
| X | AMSTTDLEA | 102 | 9 | 15 | 75 | 1697 |
| X | APCNFFTSA | 146 | 9 | 15 | 75 | 1698 |
| ENV | CIPIPSSWA | 312 | 9 | 20 | 100 | 1699 |
| ENV | CLIFLLVLL | 253 | 9 | 20 | 100 | 1700 |
| ENV | CLRRFIIFL | 239 | 9 | 19 | 95 | 1701 |
| NUC | CLTGRETV | 107 | 9 | 18 | 90 | 1702 |
| ENV | CPGYRWMCL | 232 | 9 | 20 | 100 | 1703 |
| NUC | CPTVQASKL | 14 | 9 | 16 | 80 | 1704 |
| X | CQLDPARDV | 7 | 9 | 16 | 80 | 1705 |
| NUC | DLLDTASAL | 29 | 9 | 17 | 85 | 1708 |
| POL | DLNLGNLNV | 40 | 9 | 19 | 95 | 1707 |
| X | DPARDVLCL | 10 | 9 | 16 | 80 | 1708 |
| POL | DPSRGRLGL | 778 | 9 | 18 | 90 | 1709 |
| POL | DVVLGAKSV | 541 | 9 | 18 | 90 | 1710 |
| ENV | FIIFLFILL | 243 | 9 | 16 | 80 | 1711 |
| ENV | FILLLCLIF | 248 | 9 | 16 | 80 | 1712 |
| ENV | FLFILLLCL | 248 | 9 | 16 | 80 | 1713 |
| POL | FLLAQFTSA | 513 | 9 | 19 | 95 | 1714 |
| POL | FLLSLGIHL | 562 | 9 | 19 | 95 | 1715 |
| ENV | FLLTRILTI | 183 | 9 | 16 | 80 | 1716 |
| ENV | FPDHQLDPA | 14 | 9 | 18 | 90 | 1717 |
| POL | FPHCLAFSY | 530 | 9 | 19 | 95 | 1718 |
| POL | FPWLLGCAA | 749 | 9 | 15 | 75 | 1719 |
| ENV | FVGLSPTVW | 346 | 9 | 19 | 95 | 1720 |
| POL | GLCQVFADA | 682 | 9 | 17 | 85 | 1721 |
| POL | GLLGFAAPF | 627 | 9 | 19 | 95 | 1722 |
| ENV | GLLGWSPQA | 62 | 9 | 17 | 85 | 1723 |
| POL | GVGLSPFLL | 507 | 9 | 16 | 80 | 1724 |
| NUC | GVWIRTPPA | 123 | 9 | 19 | 95 | 1725 |
| POL | HLLVGSSGL | 435 | 9 | 16 | 80 | 1726 |
| X | HLSLRGLPV | 52 | 9 | 18 | 90 | 1727 |
| POL | HLYSHPIIL | 491 | 9 | 16 | 80 | 1728 |
| POL | HPAAMPHLL | 429 | 9 | 20 | 100 | 1729 |
| ENV | IIFLFILLL | 244 | 9 | 16 | 80 | 1730 |
| POL | ILGFRKIPM | 498 | 9 | 16 | 80 | 1731 |
| ENV | ILLLCLIFL | 249 | 9 | 20 | 100 | 1732 |
| POL | ILRGTSFVY | 760 | 9 | 16 | 80 | 1733 |
| ENV | IPIPSSWAF | 313 | 9 | 20 | 100 | 1734 |
| ENV | IPQSLDSWW | 191 | 9 | 18 | 90 | 1735 |
| POL | IVGLLGFAA | 625 | 9 | 18 | 90 | 1736 |
| POL | KLHLYSHPI | 489 | 9 | 19 | 95 | 1737 |
| POL | KLIMPARFY | 108 | 9 | 15 | 75 | 1738 |
| POL | KVCQRIVGL | 620 | 9 | 17 | 85 | 1739 |
| POL | KVGNFTGLY | 55 | 9 | 19 | 95 | 1740 |
| POL | LLAQFTSAI | 514 | 9 | 19 | 95 | 1741 |
| ENV | LLCLIFLLV | 251 | 9 | 20 | 100 | 1742 |
| NUC | LLDTASALY | 30 | 9 | 17 | 85 | 1743 |
| POL | LLGCAANWI | 752 | 9 | 16 | 80 | 1744 |
| ENV | LLLCLIFLL | 250 | 9 | 20 | 100 | 1745 |
| ENV | LLPIFFCLW | 378 | 9 | 20 | 100 | 1746 |
| NUC | LLSFLPSDF | 44 | 9 | 19 | 95 | 1747 |
| POL | LLSSNLSWL | 407 | 9 | 18 | 90 | 1748 |
| ENV | LLVQAGFF | 175 | 9 | 19 | 95 | 1749 |
| ENV | LLVPFVQWF | 338 | 9 | 20 | 100 | 1750 |
| NUC | LLWFHISCL | 100 | 9 | 18 | 90 | 1751 |
| ENV | LPIFFCLWV | 379 | 9 | 20 | 100 | 1752 |
| POL | LPIHTAELL | 712 | 9 | 17 | 85 | 1753 |
| X | LPVCAFSSA | 58 | 9 | 19 | 95 | 1754 |
| POL | LPVNRPIDW | 611 | 9 | 16 | 50 | 1755 |
| ENV | LVLLDYQGM | 255 | 9 | 19 | 95 | 1758 |
| ENV | LVLQAGFFL | 176 | 9 | 18 | 90 | 1757 |
| ENV | LVPFVQWFV | 339 | 9 | 19 | 95 | 1758 |
| ENV | MMWYWGPSL | 360 | 9 | 17 | 85 | 1759 |
| POL | NLGNLNSI | 42 | 9 | 19 | 95 | 1760 |
| POL | NLLSSNLSW | 406 | 9 | 18 | 90 | 1761 |
| POL | NLQSLTNLL | 400 | 9 | 20 | 100 | 1762 |
| POL | NLSWLSLDV | 411 | 9 | 18 | 90 | 1763 |
| ENV | PIFFCLWVY | 380 | 9 | 20 | 100 | 1764 |
| POL | PIHTAELLA | 713 | 9 | 17 | 85 | 1765 |
| POL | PIILGFRKI | 496 | 9 | 16 | 80 | 1766 |
| ENV | PIPSSWAFA | 314 | 9 | 16 | 80 | 1767 |
| POL | PLDKGIKPY | 124 | 9 | 20 | 100 | 1768 |
| POL | PLEEELPRL | 20 | 9 | 19 | 95 | 1769 |
| ENV | PLLPIFFCL | 377 | 9 | 20 | 100 | 1770 |
| ENV | PLLVLQAGF | 174 | 9 | 19 | 95 | 1771 |
| POL | PLPIHTAEL | 711 | 9 | 16 | 80 | 1772 |
| POL | PMGVGLSPF | 505 | 9 | 16 | 80 | 1773 |
| NUC | PPAYRPPNA | 129 | 9 | 19 | 95 | 1774 |
| ENV | PPHGGLLGW | 58 | 9 | 17 | 65 | 1775 |
| X | QLDPARDVL | 8 | 9 | 16 | 80 | 1776 |
| ENV | RILTIPQSL | 187 | 9 | 16 | 80 | 1777 |
| POL | RIVGLLGFA | 624 | 9 | 18 | 90 | 1778 |
| POL | RLWDFSQF | 376 | 9 | 19 | 95 | 1779 |
| POL | RVTGGVFLV | 357 | 9 | 20 | 100 | 1780 |
| ENV | SLDSWWTSL | 194 | 9 | 19 | 95 | 1781 |
| POL | SLDVSAAFY | 418 | 9 | 19 | 95 | 1782 |
| ENV | SLLVPFVQW | 337 | 9 | 20 | 100 | 1783 |
| POL | SLNFMGYVI | 581 | 9 | 15 | 75 | 1784 |
| X | SLRGLPVCA | 54 | 9 | 19 | 95 | 1785 |
| ENV | SPTVWLSVI | 350 | 9 | 15 | 75 | 1786 |
| ENV | SVRFSWLSL | 330 | 9 | 16 | 80 | 1767 |
| ENV | TIPQSLDSW | 190 | 9 | 18 | 90 | 1788 |
| POL | TLWKAGILY | 150 | 9 | 20 | 100 | 1789 |
| POL | TPARVTGGV | 354 | 9 | 18 | 90 | 1790 |
| POL | TPTGWGLAI | 691 | 9 | 15 | 75 | 1791 |
| POL | TQCGYPALM | 636 | 9 | 19 | 95 | 1792 |
| NUC | TVQASKLCL | 16 | 9 | 16 | 80 | 1793 |
| ENV | TVWLSVIWM | 352 | 9 | 15 | 75 | 1794 |
| X | VLCLRPVGA | 15 | 9 | 19 | 95 | 1795 |
| X | VLGGCRHKL | 133 | 9 | 18 | 90 | 1796 |
| X | VLHKRTLGL | 92 | 9 | 17 | 85 | 1797 |
| ENV | VLLDYQGML | 259 | 9 | 19 | 95 | 1798 |
| ENV | VLQAGFFLL | 177 | 9 | 19 | 95 | 1799 |
| POL | VLSRKYTSF | 741 | 9 | 17 | 85 | 1600 |
| POL | WILRGTSFV | 759 | 9 | 16 | 80 | 1801 |
| POL | WLLGCAANW | 751 | 9 | 16 | 80 | 1802 |
| POL | WLSLDVSAA | 414 | 9 | 19 | 95 | 1803 |
| ENV | WLSLLVPFV | 335 | 9 | 20 | 100 | 1804 |
| ENV | WMCLRRFII | 237 | 9 | 19 | 95 | 1805 |
| POL | WPKFAVPNL | 393 | 9 | 19 | 95 | 1806 |
| NUC | YLVSFGVWI | 118 | 9 | 18 | 90 | 1807 |
| POL | YMDDVVLGA | 538 | 9 | 18 | 90 | 1808 |
| POL | YPALMPLYA | 640 | 9 | 19 | 95 | 1809 |
| POL | YQHFRKLLL | 5 | 9 | 15 | 75 | 1810 |
| POL | YVPSALNPA | 788 | 9 | 18 | 90 | 1811 |
| POL | AICSVVRRAF | 521 | 10 | 19 | 95 | 1812 |
| POL | APFTQCGYPA | 633 | 10 | 19 | 95 | 1813 |
| POL | AQFTSAICSV | 518 | 10 | 19 | 95 | 1814 |
| ENV | CIPIPSSWAF | 312 | 10 | 20 | 100 | 1815 |
| POL | CLAFSYMDDV | 533 | 10 | 18 | 90 | 1816 |
| NUC | CLGWLWGMDI | 23 | 10 | 17 | 85 | 1817 |
| ENV | CLRRFIIFLF | 239 | 10 | 15 | 75 | 1818 |
| X | CQLDPARDVL | 7 | 10 | 16 | 80 | 1819 |
| POL | CQRVGLLGF | 622 | 10 | 17 | 85 | 1820 |
| NUC | DIDPYKEFGA | 31 | 10 | 18 | 90 | 1821 |
| NUC | DILDTASALY | 29 | 10 | 17 | 85 | 1822 |
| X | DVLCLRPVGA | 14 | 10 | 19 | 95 | 1823 |
| NUC | ELLSFLPSDF | 43 | 10 | 19 | 95 | 1824 |
| ENV | FIIFLFILLL | 243 | 10 | 16 | 80 | 1825 |
| ENV | FILLLCLIFL | 248 | 10 | 16 | 80 | 1826 |
| ENV | FLFILLLCLI | 246 | 10 | 16 | 80 | 1827 |
| ENV | FLGPLLVLQA | 171 | 10 | 15 | 75 | 1828 |
| POL | FLLAQFTSAI | 513 | 10 | 19 | 95 | 1829 |
| ENV | FPDHQLDPAF | 14 | 10 | 17 | 85 | 1830 |
| POL | FPHCLAFSYM | 530 | 10 | 19 | 95 | 1831 |
| ENV | FVGLSPTVWL | 346 | 10 | 19 | 95 | 1832 |
| X | FVLGGCRHKL | 132 | 10 | 18 | 90 | 1833 |
| X | GLPVCAFSSA | 57 | 10 | 19 | 95 | 1834 |
| POL | GLSPFLLAQF | 509 | 10 | 19 | 95 | 1835 |
| ENV | GLSPTVWLSV | 348 | 10 | 15 | 75 | 1836 |
| NUC | GMDIDPYKEF | 29 | 10 | 17 | 85 | 1837 |
| X | GPCALRFTSA | 67 | 10 | 18 | 90 | 1838 |
| POL | GPLEEELPRL | 19 | 10 | 19 | 95 | 1839 |
| ENV | GPLLVLQAGF | 173 | 10 | 19 | 95 | 1840 |
| POL | GVGLSPFLLA | 507 | 10 | 16 | 80 | 1841 |
| NUC | GVWIRTPPAY | 123 | 10 | 19 | 95 | 1842 |
| POL | HLNPNKTKRW | 569 | 10 | 15 | 75 | 1843 |
| POL | HPAAMPHLLV | 429 | 10 | 17 | 85 | 1844 |
| POL | HPIILGFRKI | 495 | 10 | 16 | 80 | 1845 |
| POL | IILGFRKIPM | 497 | 10 | 16 | 80 | 1846 |
| ENV | ILLLCLIFLL | 249 | 10 | 20 | 100 | 1847 |
| POL | ILRGTSFVYV | 780 | 10 | 16 | 80 | 1848 |
| NUC | ILSTLPETTV | 139 | 10 | 20 | 100 | 1849 |
| ENV | IPIPSSWAFA | 313 | 10 | 16 | 80 | 1850 |
| POL | IPMGVGLSPF | 504 | 10 | 16 | 80 | 1851 |
| POL | IPWTHKVGNF | 50 | 10 | 20 | 100 | 1852 |
| NUC | KLCLGWLWGM | 21 | 10 | 17 | 85 | 1853 |
| POL | KLHLYSHPII | 489 | 10 | 16 | 80 | 1854 |
| POL | KLPVNRPIDW | 610 | 10 | 16 | 80 | 1855 |
| POL | KQAFTFSPTY | 653 | 10 | 19 | 95 | 1856 |
| POL | KVCQRVGLL | 620 | 10 | 17 | 85 | 1857 |
| X | KVLHKRTLGL | 91 | 10 | 17 | 85 | 1858 |
| ENV | LIFLLVLLDY | 254 | 10 | 19 | 95 | 1859 |
| ENV | LLCLIFLLVL | 251 | 10 | 20 | 100 | 1860 |
| ENV | LLDYQGMLPV | 260 | 10 | 18 | 90 | 1861 |
| POL | LLGCAANWIL | 752 | 10 | 16 | 80 | 1862 |
| ENV | LLLCLIFLLV | 250 | 10 | 20 | 100 | 1863 |
| ENV | LLPIFFCLWV | 378 | 10 | 20 | 100 | 1864 |
| NUC | LLSFLPSDFF | 44 | 10 | 19 | 95 | 1865 |
| ENV | LLVLLDYQGM | 257 | 10 | 19 | 95 | 1866 |
| ENV | LLVLQAGFFL | 175 | 10 | 18 | 90 | 1867 |
| ENV | LLVPFVQWFV | 338 | 10 | 19 | 95 | 1868 |
| ENV | LPIFFCLWVY | 379 | 10 | 20 | 100 | 1869 |
| POL | LPIHTAELLA | 712 | 10 | 17 | 85 | 1070 |
| X | LPKVLHKRTL | 89 | 10 | 16 | 80 | 1871 |
| POL | LPLDKGIKPY | 123 | 10 | 20 | 100 | 1872 |
| ENV | LVLLDYQGML | 258 | 10 | 19 | 95 | 1873 |
| ENV | LVLQAGFFLL | 176 | 10 | 18 | 90 | 1874 |
| ENV | MMWYWGPSLY | 360 | 10 | 17 | 85 | 1875 |
| POL | NLLSSNLSWL | 406 | 10 | 18 | 90 | 1876 |
| ENV | NLSVPNPLGF | 15 | 10 | 15 | 75 | 1877 |
| POL | NPNKTKRWGY | 571 | 10 | 15 | 75 | 1878 |
| POL | NVSIPWTHKV | 47 | 10 | 20 | 109 | 1879 |
| POL | PIDWKVCQRI | 616 | 10 | 17 | 85 | 1880 |
| ENV | PIFFCLWVYI | 380 | 10 | 20 | 100 | 1881 |
| POL | PIHTAELLAA | 713 | 10 | 17 | 85 | 1882 |
| POL | PLDKGIKPYY | 124 | 10 | 20 | 100 | 1883 |
| POL | PLEEELPRLA | 20 | 10 | 18 | 90 | 1884 |
| ENV | PLGFFPDHQL | 10 | 10 | 19 | 95 | 1885 |
| POL | PLHPAAMPHL | 427 | 10 | 20 | 100 | 1886 |
| ENV | PLLPIFFCLW | 377 | 10 | 20 | 100 | 1887 |
| ENV | PLLVLQAGFF | 174 | 10 | 19 | 95 | 1888 |
| POL | PLPIHTAELL | 711 | 10 | 16 | 80 | 1889 |
| POL | PLSYQHFRKL | 2 | 10 | 15 | 75 | 1890 |
| POL | PLTVNEKRRL | 98 | 10 | 17 | 85 | 1891 |
| POL | PMGVGLSPFL | 505 | 10 | 16 | 80 | 1892 |
| NUC | PPNAPILSTL | 134 | 10 | 20 | 100 | 1893 |
| POL | PVNRPIDWKV | 612 | 10 | 17 | 85 | 1894 |
| NUC | QLLWFHISCL | 99 | 10 | 18 | 90 | 1895 |
| POL | RIVGLLGFAA | 624 | 10 | 18 | 90 | 1696 |
| POL | RLKLIMPARF | 106 | 10 | 15 | 75 | 1897 |
| NUC | RQALCWGEL | 56 | 10 | 18 | 90 | 1896 |
| POL | RVHFASPLHV | 818 | 10 | 15 | 75 | 1899 |
| ENV | SLLVPCQWF | 337 | 10 | 20 | 100 | 1900 |
| X | SLRGLPVCAF | 54 | 10 | 19 | 95 | 1901 |
| POL | SLTNLLSSNL | 403 | 10 | 18 | 90 | 1902 |
| NUC | SPHHTALRQA | 49 | 10 | 20 | 100 | 1903 |
| ENV | SPTVWLSVIW | 350 | 10 | 15 | 75 | 1904 |
| ENV | SVRFSWLSLL | 330 | 10 | 16 | 80 | 1905 |
| ENV | TIPQSLDSWW | 190 | 10 | 18 | 90 | 1906 |
| POL | TPARVTGGVF | 354 | 10 | 18 | 90 | 1907 |
| NUC | TPPAYRPPNA | 128 | 10 | 19 | 95 | 1908 |
| ENV | TPPHGGLLGW | 57 | 10 | 15 | 75 | 1909 |
| POL | VLGAKSVQHL | 543 | 10 | 17 | 85 | 1910 |
| X | VLGGCRHKLV | 133 | 10 | 18 | 90 | 1911 |
| ENV | VPFVQWFVGL | 340 | 10 | 19 | 95 | 1912 |
| POL | VPNLQSLTNL | 398 | 10 | 19 | 95 | 1913 |
| NUC | VQASKLCLGW | 17 | 10 | 16 | 80 | 1914 |
| POL | VVLSRKYTSF | 740 | 10 | 17 | 85 | 1915 |
| POL | WRRAFPHCL | 525 | 10 | 19 | 95 | 1916 |
| POL | WILRGTSFVY | 759 | 10 | 16 | 80 | 1917 |
| POL | WLLGCAANWI | 751 | 10 | 16 | 80 | 1918 |
| POL | WLSLDVSAAF | 414 | 10 | 19 | 95 | 1919 |
| NUC | WLWGMDIDPY | 26 | 10 | 17 | 85 | 1920 |
| ENV | WMCLRRFIIF | 237 | 10 | 19 | 95 | 1921 |
| ENV | WMMWYWGPSL | 359 | 10 | 17 | 85 | 1922 |
| POL | YLHTLWKAGI | 147 | 10 | 20 | 100 | 1923 |
| ENV | YQGMLPVCPL | 263 | 10 | 18 | 90 | 1924 |
| POL | YQHFRKLLLL | 5 | 10 | 15 | 75 | 1925 |
| POL | APFTQCGYPAL | 633 | 11 | 19 | 95 | 1926 |
| POL | AQFTSAICSVV | 516 | 11 | 19 | 95 | 1927 |
| POL | AVPNLQSLTNL | 397 | 11 | 19 | 95 | 1928 |
| ENV | CIPIPSSWAFA | 312 | 11 | 16 | 80 | 1929 |
| POL | CLAFSYMDDVV | 533 | 11 | 18 | 90 | 1930 |
| ENV | CLIFLLVLLDY | 253 | 11 | 19 | 95 | 1931 |
| ENV | CLRRFIIFLFI | 239 | 11 | 15 | 75 | 1932 |
| NUC | CPTVQASKLCL | 14 | 11 | 16 | 80 | 1933 |
| POL | CQRIVGLLGFA | 622 | 11 | 17 | 85 | 1934 |
| POL | DLNLGNLNVSI | 40 | 11 | 19 | 95 | 1935 |
| NUC | ELLSFLPSDFF | 43 | 11 | 19 | 95 | 1936 |
| ENV | FILLLCLIFLL | 248 | 11 | 16 | 80 | 1937 |
| ENV | FLFILLLCLIF | 246 | 11 | 16 | 80 | 1938 |
| ENV | FLLVLLDYQGM | 256 | 11 | 19 | 95 | 1939 |
| ENV | FPAGGSSSGTV | 130 | 11 | 15 | 75 | 1940 |
| POL | FPWLLGCAANW | 749 | 11 | 15 | 75 | 1941 |
| X | FVLGGCRHKLV | 132 | 11 | 18 | 90 | 1942 |
| POL | FVYVPSALNPA | 766 | 11 | 18 | 90 | 1943 |
| ENV | GLSPTVWLSVI | 348 | 11 | 15 | 75 | 1944 |
| POL | GPLEEELPRLA | 19 | 11 | 18 | 90 | 1945 |
| ENV | GPLLVLQAGFF | 173 | 11 | 19 | 95 | 1946 |
| POL | GPLTVNEKRRL | 97 | 11 | 17 | 85 | 1947 |
| X | HLSLRGLPVCA | 52 | 11 | 18 | 90 | 1948 |
| POL | HLYSHPIILGF | 491 | 11 | 16 | 80 | 1949 |
| ENV | IIFLFILLLCL | 244 | 11 | 16 | 80 | 1950 |
| ENV | ILLLCLIFLLV | 249 | 11 | 20 | 100 | 1951 |
| NUC | ILSTLPETIVV | 139 | 11 | 20 | 100 | 1952 |
| ENV | ILTIPQSLDSW | 188 | 11 | 18 | 90 | 1953 |
| POL | IPMGVGLSPFL | 504 | 11 | 16 | 80 | 1954 |
| POL | IVGLLGFAAPF | 625 | 11 | 18 | 90 | 1955 |
| POL | KIPMGVGLSPF | 503 | 11 | 16 | 80 | 1956 |
| POL | KLHLYSNPIIL | 489 | 11 | 16 | 80 | 1957 |
| ENV | LLCLIFLLVLL | 251 | 11 | 20 | 100 | 1958 |
| ENV | LLGWSPQAQGI | 63 | 11 | 15 | 75 | 1959 |
| ENV | LLLCLIFLLVL | 250 | 11 | 20 | 100 | 1960 |
| ENV | LLPIFFCLWVY | 378 | 11 | 20 | 100 | 1961 |
| POL | LLSSNLSWLSL | 407 | 11 | 18 | 90 | 1962 |
| ENV | LLVLLDYQGML | 257 | 11 | 19 | 95 | 1963 |
| ENV | LLVLQAGFFLL | 175 | 11 | 18 | 90 | 1964 |
| NUC | LLWFHISCLTF | 100 | 11 | 17 | 85 | 1965 |
| ENV | LPIFFCLWVYI | 379 | 11 | 20 | 100 | 1966 |
| POL | LPIHTAELLAA | 712 | 11 | 17 | 85 | 1987 |
| POL | LPLDKGIKPYY | 123 | 11 | 20 | 100 | 1968 |
| POL | LPVNRPIDWKV | 611 | 11 | 16 | 80 | 1969 |
| 644 | LQAGFFLLTRI | 178 | 11 | 16 | 80 | 1970 |
| ENV | LVPFVQWFVGL | 339 | 11 | 19 | 95 | 1971 |
| POL | MPHLLVGSSGL | 433 | 11 | 16 | 80 | 1972 |
| POL | MPLSYQHFRKL | 1 | 11 | 15 | 75 | 1973 |
| POL | NLGNLNVSPW | 42 | 11 | 19 | 95 | 1974 |
| POL | NLSWLSLDVSA | 411 | 11 | 18 | 90 | 1975 |
| POL | NPADDPSRGRL | 774 | 11 | 18 | 90 | 1976 |
| ENV | NPLGFFPDHQL | 9 | 11 | 19 | 95 | 1977 |
| POL | PIDWKVCQRV | 616 | 11 | 17 | 85 | 1978 |
| POL | PIILGFRKIPM | 496 | 11 | 16 | 80 | 1979 |
| NUC | PILSTLPETTV | 138 | 11 | 20 | 100 | 1980 |
| POL | PLHPAAMPHLL | 427 | 11 | 20 | 100 | 1981 |
| ENV | PLLPIFFCLWV | 377 | 11 | 20 | 100 | 1982 |
| ENV | PLLVLQAGFFL | 174 | 11 | 18 | 90 | 1983 |
| POL | PLPIHTAELLA | 711 | 11 | 16 | 80 | 1984 |
| POL | PLSYQHFRKLL | 2 | 11 | 15 | 75 | 1985 |
| POL | PMGVGLSPFLL | 505 | 11 | 16 | 80 | 1986 |
| NUC | PPAYRPPNAPI | 129 | 11 | 19 | 95 | 1987 |
| ENV | PQAMQWNSTTF | 106 | 11 | 16 | 80 | 1988 |
| ENV | PQSLDSWWTSL | 192 | 11 | 18 | 90 | 1989 |
| X | QLDPARDVLCL | 8 | 11 | 16 | 80 | 1990 |
| POL | QVFADATPTGW | 885 | 11 | 19 | 95 | 1991 |
| POL | RLKLIMPARFY | 106 | 11 | 15 | 75 | 1992 |
| POL | RPIDWKVCQRI | 615 | 11 | 16 | 80 | 1993 |
| NUC | RPPNAPILSTL | 133 | 11 | 20 | 100 | 1994 |
| NUC | RQAILCWGELM | 56 | 11 | 18 | 90 | 1995 |
| NUC | RQLLWFHISCL | 98 | 11 | 18 | 90 | 1996 |
| POL | RVAEDLNLGNL | 36 | 11 | 18 | 90 | 1997 |
| POL | RVHFASPLHVA | 818 | 11 | 15 | 75 | 1998 |
| POL | SIPWTHKVGNF | 49 | 11 | 20 | 100 | 1999 |
| ENV | SLDSWWTSLNF | 194 | 11 | 19 | 95 | 2000 |
| ENV | SLLVPFVQWFV | 337 | 11 | 19 | 95 | 2001 |
| NUC | SPEHCSPHHTA | 44 | 11 | 20 | 100 | 2002 |
| POL | SPFLLAQFTSA | 511 | 11 | 19 | 95 | 2003 |
| NUC | SPHHTALRQAI | 49 | 11 | 20 | 100 | 2004 |
| ENV | SPTVWLSVIWM | 350 | 11 | 15 | 75 | 2005 |
| ENV | SVRFWLSLLV | 330 | 11 | 16 | 80 | 2006 |
| POL | SVVLSRKYTSF | 739 | 11 | 17 | 85 | 2007 |
| POL | SVVRRAFPHCL | 524 | 11 | 19 | 95 | 2008 |
| POL | TPARVTGGVFL | 354 | 11 | 18 | 90 | 2009 |
| POL | TQCGYPALMPL | 636 | 11 | 19 | 95 | 2010 |
| NUC | TVQASKLCLGW | 16 | 11 | 16 | 80 | 2011 |
| ENV | VLLDYQGMLPV | 259 | 11 | 18 | 90 | 2012 |
| POL | VLSRKYTSFPW | 741 | 11 | 17 | 85 | 2013 |
| POL | VPNLQSLTNLL | 398 | 11 | 19 | 95 | 2014 |
| NUC | VQASKLCLGWL | 17 | 11 | 16 | 80 | 2015 |
| ENV | VQWFVGLSPTV | 343 | 11 | 19 | 95 | 2016 |
| POL | VVLGAKSVQHL | 542 | 11 | 16 | 80 | 2017 |
| POL | WRRAFPHCLA | 525 | 11 | 19 | 95 | 2018 |
| POL | WILRGTSFVYV | 759 | 11 | 16 | 80 | 2019 |
| POL | WLLGCAANWIL | 751 | 11 | 16 | 80 | 2020 |
| POL | WLSLDVSAAFY | 414 | 11 | 19 | 95 | 2021 |
| ENV | WLSLLVPFVQW | 335 | 11 | 20 | 100 | 2022 |
| ENV | WMCLRRFIIFL | 237 | 11 | 19 | 95 | 2023 |
| ENV | WMMWYWGPSLY | 359 | 11 | 17 | 85 | 2024 |
| POL | YLHTLWKAGIL | 147 | 11 | 20 | 100 | 2025 |
| POL | YLPLDKGIKPY | 122 | 11 | 20 | 100 | 2026 |
| POL | YPALMPLYACI | 640 | 11 | 19 | 95 | 2027 |

[0430] TABLE XV

HBV A01 Motif with Binding Information

| | | | | | | | |
|---|---|---|---|---|---|---|---|
| Conservancy | Freq. | Protein | Position | Sequence | AA | A*0101 | SEQ ID NO: |

| | | | | | | | |
|---|---|---|---|---|---|---|---|
| 100 | 20 | POL | 166 | ASFCGSPY | 8 | | 2028 |
| 90 | 18 | POL | 737 | DNSWLSRKY | 10 | 0.0001 | 2029 |
| 95 | 19 | POL | 631 | FAAPFTQCGY | 10 | 0.0680 | 2030 |
| 95 | 19 | POL | 630 | GFAAPFTQCGY | 11 | | 2031 |
| 75 | 15 | NUC | 140 | GRETVLEY | 8 | | 2032 |
| 85 | 17 | POL | 579 | GYSLNFMGY | 9 | | 2033 |
| 100 | 20 | POL | 149 | HTLWKAGILY | 10 | 0.1100 | 2034 |
| 95 | 19 | POL | 653 | KQAFTFSPTY | 10 | 0.0001 | 2035 |
| 85 | 17 | NUC | 30 | LLDTASALY | 9 | 12.0000 | 2036 |
| 95 | 19 | POL | 415 | LSLDVSAAFY | 10 | 0.0150 | 2037 |
| 75 | 15 | NUC | 137 | LTFGRETVLEY | 11 | | 2038 |
| 85 | 17 | ENV | 360 | MMWYWGPSLY | 10 | 0.0810 | 2039 |
| 75 | 15 | X | 103 | MSTTDLEAY | 9 | 0.8500 | 2040 |
| 90 | 18 | POL | 738 | NSWLSRKY | 9 | 0.0005 | 2041 |
| 100 | 20 | POL | 124 | PLDKGIKPY | 9 | | 2042 |
| 100 | 20 | POL | 124 | PLDKGIKPYY | 10 | 0.1700 | 2043 |
| 85 | 17 | POL | 797 | PTTGRTSLY | 9 | 0.2100 | 2044 |
| 100 | 20 | POL | 165 | SASFCGSPY | 9 | | 2045 |
| 95 | 19 | POL | 416 | SLDVSAAFY | 9 | 5.2000 | 2046 |
| 75 | 15 | X | 104 | STTDLEAY | 8 | | 2047 |
| 85 | 17 | POL | 798 | TTGRTSLY | 8 | | 2048 |
| 95 | 19 | POL | 414 | WLSLDVSAAFY | 11 | | 2049 |
| 85 | 17 | ENV | 359 | WMMWYWGPSLY | 11 | 0.3200 | 2050 |
| 95 | 19 | POL | 640 | YPALMPLY | 8 | | 2051 |
| 85 | 17 | POL | 580 | YSLNFMGY | 8 | | 2052 |

[0431] TABLE XVI

HBV A03 Motif With Binding

| | | | | | | | |
|---|---|---|---|---|---|---|---|
| Conservancy | Freq. | Protein | Position | Sequence | AA | A*0301 | Seq ID Num |

| | | | | | | | |
|---|---|---|---|---|---|---|---|
| 85 | 17 | POL | 721 | AACFARSR | 8 | 0.0004 | 2053 |
| 85 | 17 | POL | 721 | AACFARSRSGA | 11 | | 2054 |
| 95 | 19 | POL | 632 | AAPFTQCGY | 9 | | 2055 |
| 95 | 19 | POL | 632 | AAPFTQCGYPA | 11 | | 2056 |
| 85 | 17 | POL | 722 | ACFARSRSGA | 10 | | 2057 |
| 80 | 16 | POL | 688 | ADATPTGWGLA | 11 | | 2058 |
| 90 | 18 | POL | 776 | ADDPSRGR | 8 | | 2059 |
| 95 | 19 | POL | 529 | AFPHCLAF | 8 | | 2060 |
| 95 | 19 | POL | 529 | AFPHCLAFSY | 10 | | 2061 |
| 95 | 19 | X | 62 | AFSSAGPCA | 9 | | 2062 |
| 90 | 18 | X | 62 | AFSSAGPCALR | 11 | | 2063 |
| 95 | 19 | POL | 655 | AFTFSPTY | 8 | | 2064 |
| 95 | 19 | POL | 655 | AFTFSPTYK | 9 | 0.2600 | 2065 |
| 95 | 19 | POL | 655 | AFTFSPTYKA | 10 | | 2066 |
| 95 | 19 | POL | 655 | AFTFSPTYKAF | 11 | | 2067 |
| 80 | 16 | ENV | 180 | AGFFLLTR | 8 | | 2068 |
| 90 | 18 | X | 66 | AGPCALRF | 8 | | 2069 |
| 90 | 18 | X | 66 | AGPCALRFTSA | 11 | | 2070 |
| 95 | 19 | POL | 18 | AGPLEEELPR | 10 | 0.0004 | 2071 |
| 95 | 19 | POL | 521 | AICSWRR | 8 | −0.0002 | 2072 |
| 95 | 19 | POL | 521 | AICSVVRRA | 9 | | 2073 |
| 95 | 19 | POL | 521 | AICSWRRAF | 10 | | 2074 |
| 95 | 19 | POL | 41 | ALESPEHCSPH | 11 | | 2075 |
| 90 | 18 | POL | 772 | ALNPADDPSR | 10 | 0.0003 | 2076 |
| 85 | 17 | X | 70 | ALRFTSAR | 8 | 0.0047 | 2077 |
| 80 | 16 | ENV | 108 | AMQWNSTTF | 9 | | 2078 |
| 80 | 16 | ENV | 108 | AMQWNSTTFH | 10 | | 2079 |
| 75 | 15 | X | 102 | AMSITDLEA | 9. | | 2080 |
| 85 | 17 | NUC | 34 | ASALYREA | 8 | | 2081 |
| 100 | 20 | POL | 166 | ASFCGSPY | 8 | 0.0460 | 2082 |
| 80 | 16 | POL | 822 | ASPLHVAWR | 9 | | 2083 |
| 75 | 15 | ENV | 84 | ASTNRQSGR | 9 | 0.0009 | 2084 |
| 80 | 16 | POL | 690 | ATPTGWGLA | 9 | | 2085 |
| 80 | 16 | POL | 755 | CAANWILR | 8 | | 2086 |
| 95 | 19 | X | 61 | CAFSSAGPCA | 10 | | 2087 |
| 90 | 18 | X | 69 | CALRFTSA | 8 | | 2088 |
| 85 | 17 | X | 69 | CALRFTSAR | 9 | 0.0034 | 2089 |
| 80 | 16 | X | 6 | CCQLDPAR | 8 | | 2090 |
| 85 | 17 | POL | 723 | CFARSRSGA | 9 | | 2091 |
| 75 | 15 | POL | 607 | CFRKLPVNR | 9 | | 2092 |
| 95 | 19 | POL | 638 | CGYPALMPLY | 10 | | 2093 |
| 95 | 19 | POL | 638 | CGYPALMPLYA | 11 | | 2094 |
| 100 | 20 | ENV | 312 | CIPIPSSWA | 9 | | 2095 |
| 100 | 20 | ENV | 312 | CIPIPSSWAF | 10 | | 2096 |
| 80 | 16 | EVN | 312 | CIPIPSSWAFA | 11 | | 2097 |
| 95 | 19 | ENV | 253 | CLIFLLVLLDY | 11 | 0.0083 | 2098 |
| 90 | 18 | X | 17 | CLRPVGAESR | 10 | 0.0011 | 2099 |
| 95 | 19 | ENV | 239 | CLRRFIIF | 8 | | 2100 |
| 75 | 15 | ENV | 239 | CLRRFIIFLF | 10 | | 2101 |
| 100 | 20 | NUC | 48 | CSPHHTALR | 9 | 0.0029 | 2102 |
| 100 | 20 | NUC | 48 | CSPHHTALRQA | 11 | | 2103 |
| 95 | 19 | POL | 523 | CSVVRRAF | 8 | | 2104 |
| 95 | 19 | POL | 523 | CSVVRRAFPH | 10 | | 2105 |
| 100 | 20 | ENV | 310 | CTCIPIPSSWA | 11 | | 2106 |
| 80 | 16 | POL | 689 | DATPTGWGLA | 10 | | 2107 |
| 90 | 18 | POL | 540 | DDVVLGAK | 8 | | 2108 |
| 90 | 18 | NUC | 31 | DIDPYKEF | 8 | | 2109 |
| 90 | 18 | NUC | 31 | DIDPYKEFGA | 10 | | 2110 |
| 85 | 17 | NUC | 29 | DLLDTASA | 8 | | 2111 |
| 85 | 17 | NUC | 29 | DLLDTASALY | 10 | 0.0001 | 2112 |
| 85 | 17 | NUC | 29 | DLLDTASALYR | 11 | 0.0042 | 2113 |
| 95 | 19 | ENV | 196 | DSWWTSLNF | 9 | 0.0006 | 2114 |
| 85 | 17 | NUC | 32 | DTASALYR | 8 | 0.0004 | 2115 |
| 80 | 16 | NUC | 32 | DTASALYREA | 10 | | 2116 |
| 95 | 19 | X | 14 | DVLCLRPVGA | 10 | | 2117 |
| 95 | 19 | POL | 418 | DVSAAFYH | 8 | | 2118 |
| 90 | 18 | POL | 541 | DVVLGAKSVQH | 11 | | 2119 |
| 95 | 19 | POL | 17 | EAGPLEEELPR | 11 | −0.0009 | 2120 |
| 90 | 18 | NUC | 40 | EALESPEH | 8 | | 2121 |
| 90 | 18 | POL | 718 | ELLAACFA | 8 | | 2122 |
| 90 | 18 | POL | 718 | ELLAACFAR | 9 | 0.0002 | 2123 |
| 85 | 17 | POL | 718 | ELLAACFARSR | 11 | 0.0082 | 2124 |
| 95 | 19 | NUC | 43 | ELLSFLPSDF | 10 | | 2125 |
| 95 | 19 | NUC | 43 | ELLSFLPSDFF | 11 | | 2126 |
| 95 | 19 | NUC | 43 | ESPEHCSPH | 9 | | 2127 |
| 95 | 19 | NUC | 43 | ESPEHCSPHH | 10 | | 2128 |
| 95 | 19 | POL | 374 | ESRLVVDF | 8 | | 2129 |
| 95 | 19 | POL | 374 | ESRLVVDFSQF | 11 | | 2130 |
| 95 | 19 | NUC | 174 | ETTVVRRR | 8 | 0.0003 | 2131 |
| 80 | 16 | NUC | 174 | ETTVVRRRGR | 10 | 0.0003 | 2132 |
| 95 | 19 | POL | 631 | FAAPFTQCGY | 10 | | 2133 |
| 85 | 17 | POL | 724 | FARSRSGA | 8 | | 2134 |
| 80 | 16 | POL | 821 | FASPLHVA | 8 | | 2135 |
| 80 | 16 | POL | 821 | FASPLHVAWR | 10 | | 2136 |
| 90 | 18 | ENV | 13 | FFPDHQLDPA | 10 | | 2137 |
| 85 | 17 | ENV | 13 | FFPDHQLDPAF | 11 | | 2138 |
| 75 | 15 | NUC | 139 | FGRETVLEY | 9 | | 2139 |
| 75 | 15 | POL | 244 | FGVEPSGSGH | 10 | | 2140 |
| 95 | 19 | NUC | 122 | FGVWIRTPPA | 10 | | 2141 |
| 95 | 19 | NUC | 122 | FGVWIRTPPAY | 11 | | 2142 |
| 80 | 16 | ENV | 248 | FILLLCLIF | 9 | | 2143 |
| 80 | 16 | ENV | 246 | FLFILLLCLIF | 11 | | 2144 |
| 75 | 15 | ENV | 171 | FLGPLLVLQA | 10 | | 2145 |
| 95 | 19 | POL | 513 | FLLAQFTSA | 9 | 0.0006 | 2146 |
| 95 | 19 | POL | 562 | FLLSLGIH | 8 | | 2147 |
| 95 | 19 | ENV | 256 | FLLVLLDY | 8 | 0.0050 | 2148 |
| 100 | 20 | POL | 363 | FLVDKNPH | 8 | | 2149 |
| 95 | 19 | POL | 658 | FSPTYKAF | 8 | | 2150 |
| 95 | 19 | X | 63 | FSSAGPCA | 8 | | 2151 |
| 90 | 18 | X | 63 | FSSAGPCALR | 10 | | 2152 |
| 90 | 18 | X | 63 | FSSAGPCALRF | 11 | | 2153 |
| 100 | 20 | ENV | 333 | FSWLSLLVPF | 10 | 0.0004 | 2154 |
| 90 | 18 | POL | 536 | FSYMDDVVLGA | 11 | | 2155 |
| 95 | 19 | POL | 656 | FTFSPTYK | 8 | 0.0100 | 2156 |
| 95 | 19 | POL | 656 | FTFSPTYKA | 9 | | 2157 |
| 95 | 19 | POL | 656 | FTFSPTYKAF | 10 | 0.0004 | 2158 |
| 95 | 19 | POL | 635 | FTOCGYPA | 8 | | 2159 |
| 95 | 19 | POL | 518 | FTSAICSVVR | 10 | 0.0003 | 2160 |
| 95 | 19 | POL | 518 | FTSAICSVVRR | 11 | 0.0065 | 2161 |
| 95 | 19 | X | 132 | FVLGGCRH | 8 | | 2162 |
| 90 | 18 | X | 132 | FVLGGCRHK | 9 | 0.0430 | 2163 |
| 90 | 18 | POL | 766 | FVYVPSALNPA | 11 | | 2164 |
| 80 | 16 | POL | 754 | GCAANWILR | 9 | | 2165 |
| 95 | 19 | POL | 630 | GFAAPFTOOGY | 11 | | 2166 |
| 90 | 18 | ENV | 12 | GFFPDHOLDPA | 11 | | 2167 |
| 75 | 15 | ENV | 170 | GFLGPLLVLOA | 11 | | 2168 |
| 85 | 17 | ENV | 61 | GGLLGWSPQA | 10 | | 2169 |
| 100 | 20 | POL | 360 | GGVFLVDK | 8 | | 2170 |
| 100 | 20 | POL | 360 | GGVFLVDKNPH | 11 | | 2171 |
| 75 | 15 | POL | 567 | GIHLNPNK | 8 | | 2172 |
| 75 | 15 | POL | 567 | GIHLNPNKTK | 10 | 0.0025 | 2173 |
| 75 | 15 | POL | 567 | GIHLNPNKTKR | 11 | | 2174 |
| 85 | 17 | POL | 682 | GLCQVFADA | 9 | 0.0001 | 2175 |
| 95 | 19 | POL | 627 | GLLGFAAPF | 9 | 0.0006 | 2176 |
| 85 | 17 | ENV | 62 | GLLGWSPOA | 9 | | 2177 |
| 95 | 19 | X | 57 | GLPVCAFSSA | 10 | | 2178 |
| 95 | 19 | POL | 509 | GLSPFLLA | 8 | | 2179 |
| 95 | 19 | POL | 509 | GLSPFLLAQF | 10 | | 2180 |
| 85 | 17 | NUC | 29 | GMDIDPYK | 8 | 0.0006 | 2181 |
| 85 | 17 | NUC | 29 | GMDIDPYKEF | 10 | −0.0003 | 2182 |
| 90 | 18 | POL | 735 | GTDNSVVLSR | 10 | 0.0010 | 2183 |
| 90 | 18 | POL | 735 | GTDNSVVLSRK | 11 | 0.0140 | 2184 |
| 80 | 16 | POL | 763 | GTSFVYVPSA | 10 | | 2185 |
| 80 | 16 | POL | 245 | GVEPSGSGH | 9 | | 2186 |
| 100 | 20 | POL | 361 | GVFLVDKNPH | 10 | | 2187 |
| 80 | 16 | POL | 507 | GVGLSPFLLA | 10 | | 2188 |
| 95 | 19 | NUC | 123 | GVWIRTPPA | 9 | | 2189 |
| 95 | 19 | NUC | 123 | GVWIRTPPAY | 10 | 0.0047 | 2190 |
| 95 | 19 | NUC | 123 | GVWIRTPPAYR | 11 | 0.1900 | 2191 |
| 100 | 20 | NUC | 47 | HCSPHHTA | 8 | | 2192 |
| 100 | 20 | NUC | 47 | HCSPHHTALR | 10 | | 2193 |
| 80 | 16 | POL | 820 | HFASPLHVA | 9 | | 2194 |
| 80 | 16 | POL | 820 | HFASPLHVAWR | 11 | | 2195 |
| 95 | 19 | X | 49 | HGAHLSLR | 8 | | 2196 |
| 85 | 17 | ENV | 60 | HGGLLGWSPQA | 11 | | 2197 |
| 90 | 18 | NUC | 104 | HISCLTFGR | 9 | | 2198 |
| 75 | 15 | POL | 569 | HLNPNKTK | 8 | | 2199 |
| 75 | 15 | POL | 569 | HLNPNKTKR | 9 | | 2200 |
| 90 | 18 | X | 52 | HLSLRGLPVCA | 11 | | 2201 |
| 80 | 16 | POL | 491 | HLYSHPIILGF | 11 | | 2202 |
| 85 | 17 | POL | 715 | HTAELLAA | 8 | | 2203 |
| 85 | 17 | POL | 715 | HTAELLAACF | 10 | | 2204 |
| 85 | 17 | POL | 715 | HTAELLAACFA | 11 | | 2205 |
| 100 | 20 | POL | 149 | HTLWKAGILY | 10 | 0.0440 | 2206 |
| 100 | 20 | POL | 149 | HTLWKAGILYK | 11 | 0.5400 | 2207 |
| 95 | 19 | POL | 522 | ICSVVRRA | 8 | | 2208 |
| 95 | 19 | POL | 522 | ICSVVRRAF | 9 | | 2209 |
| 95 | 19 | POL | 522 | ICSVVRRAFPH | 11 | | 2210 |
| 90 | 18 | NUC | 32 | IDPYKEFGA | 9 | | 2211 |
| 90 | 18 | POL | 617 | IDWKVCQR | 8 | | 2212 |
| 100 | 20 | ENV | 381 | IFFCLWVY | 8 | | 2213 |
| 95 | 19 | ENV | 255 | IFLIVLLDY | 9 | | 2214 |
| 80 | 16 | POL | 734 | IGTDNSVVLSR | 11 | | 2215 |
| 100 | 20 | ENV | 249 | ILILCLIF | 8 | | 2216 |
| 80 | 16 | POL | 760 | ILRGTSFVY | 9 | 0.0440 | 2217 |
| 90 | 18 | NUC | 105 | IDCLTFGR | 8 | 0.0004 | 2218 |
| 90 | 18 | POL | 625 | IVGLLGFA | 8 | | 2219 |
| 90 | 18 | POL | 625 | IVGLLGFAA | 9 | | 2220 |
| 90 | 18 | POL | 625 | IVGLLGFAAPF | 11 | | 2221 |
| 100 | 20 | POL | 153 | KAGILYKR | 8 | 0.0002 | 2222 |
| 80 | 16 | POL | 503 | KIPMGVGLSPF | 11 | | 2223 |
| 75 | 15 | POL | 108 | KLIMPARF | 8 | | 2224 |
| 75 | 15 | POL | 108 | KLIMPARFY | 9 | | 2225 |
| 80 | 16 | POL | 610 | KLPVNRPIDWK | 11 | | 2226 |
| 85 | 17 | POL | 574 | KTKRWGYSLNF | 11 | | 2227 |
| 75 | 15 | X | 130 | KVFVLGGCR | 9 | 0.0420 | 2228 |
| 75 | 15 | X | 130 | KVFVIGGCRH | 10 | | 2229 |
| 95 | 19 | POL | 55 | KVGNFTGLY | 9 | 0.2100 | 2230 |
| 85 | 17 | POL | 720 | LAACFARSR | 9 | 0.0058 | 2231 |
| 95 | 19 | X | 16 | LCLRPVGA | 8 | | 2232 |
| 90 | 18 | X | 16 | LCLRPVGAESR | 11 | | 2233 |
| 95 | 19 | POL | 683 | LCQVFADA | 8 | | 2234 |
| 100 | 20 | POL | 125 | LDKGIKPY | 8 | | 2235 |
| 100 | 20 | POL | 125 | LDKGIKPYY | 9 | | 2236 |
| 80 | 16 | X | 9 | LDPARDVLCLR | 11 | | 2237 |
| 95 | 19 | ENV | 195 | LDSWWTSLNF | 10 | | 2238 |
| 85 | 17 | NUC | 31 | LDTASALY | 8 | | 2239 |
| 85 | 17 | NUC | 31 | LDTASALYR | 9 | 0.0004 | 2240 |
| 80 | 16 | NUC | 31 | LDTASALYREA | 11 | | 2241 |
| 95 | 19 | POL | 417 | LDVSAAFY | 8 | | 2242 |
| 95 | 19 | POL | 417 | LDVSAAFYH | 9 | | 2243 |
| 80 | 16 | ENV | 247 | LFILLLCLIF | 10 | | 2244 |
| 95 | 19 | POL | 544 | LGAKSVQH | 8 | | 2245 |
| 80 | 16 | POL | 753 | LGCAANWILR | 10 | | 2246 |
| 75 | 15 | P0L | 566 | LGIHLNPNK | 9 | | 2247 |
| 75 | 15 | POL | 566 | LGIHLNPNKTK | 11 | | 2248 |
| 95 | 19 | ENV | 172 | LGPLLVLQA | 9 | | 2249 |
| 95 | 19 | ENV | 172 | LGPLLVLQAGF | 11 | | 2250 |
| 95 | 19 | ENV | 254 | LIFLLVLLDY | 10 | 0.0022 | 2251 |
| 100 | 20 | POL | 109 | LIMPARFY | 8 | −0.0002 | 2252 |
| 90 | 18 | POL | 719 | LLAACFAR | 8 | 0.0024 | 2253 |
| 85 | 17 | POL | 719 | LLAACFARSR | 10 | | 2254 |
| 95 | 19 | POL | 514 | LLAQFTSA | 8 | | 2255 |
| 85 | 17 | NUC | 30 | LLDTASALY | 9 | 0.0013 | 2256 |
| 85 | 17 | NUC | 30 | LLDTASALYR | 10 | 0.0050 | 2257 |
| 80 | 16 | POL | 752 | LLGCAANWILR | 11 | | 2258 |
| 95 | 19 | POL | 628 | LLGFAAPF | 8 | | 2259 |
| 85 | 17 | ENV | 63 | LLGWSPQA | 8 | | 2260 |
| 100 | 20 | ETV | 378 | LLPIFFCLWVY | 11 | 0.0230 | 2261 |
| 95 | 19 | NUC | 44 | LLSFLPSDF | 9 | | 2262 |
| 95 | 19 | NUC | 44 | LLSFLPSDFF | 10 | | 2263 |
| 95 | 19 | ENV | 175 | LLVLQAGF | 8 | | 2264 |
| 95 | 19 | ENV | 175 | LLVLQAGFF | 9 | 0.0006 | 2265 |
| 100 | 20 | ENV | 336 | LLVPFVQWF | 9 | | 2266 |
| 85 | 17 | NUC | 100 | LLWFHISCLTF | 11 | | 2267 |
| 95 | 19 | NUC | 45 | LSFLPSDF | 8 | | 2268 |
| 95 | 19 | NUC | 45 | LSFLPSDFF | 9 | 0.0006 | 2269 |
| 95 | 19 | POL | 415 | LSLDVSAA | 8 | | 2270 |
| 95 | 19 | POL | 415 | LSLDVSAAF | 9 | 0.0004 | 2271 |
| 95 | 19 | POL | 415 | LSLDVSAAFY | 10 | | 2272 |
| 95 | 19 | POL | 415 | LSLDVSAAFYI | 11 | | 2273 |
| 75 | 15 | POL | 564 | LSLGIHLNPNK | 11 | | 2274 |
| 100 | 20 | ENV | 336 | LSLLVPFVQWF | 11 | | 2275 |
| 95 | 19 | X | 53 | LSLRGLPVCA | 10 | | 2276 |
| 95 | 19 | X | 53 | LSLRGLPVCAF | 11 | | 2277 |
| 95 | 19 | POL | 510 | LSPFLLAQF | 9 | | 2278 |
| 9 5 85 | 17 | POL | 742 | LSRKYTSF | 8 | | 2279 |
| 95 | 19 | NUC | 169 | LSTLPETTVVR | 11 | −0.0009 | 2280 |
| 75 | 15 | ENV | 16 | LSVPNPLGF | 9 | | 2281 |
| 100 | 20 | POL | 412 | LSWLSLDVSA | 10 | 0.0048 | 2282 |
| 100 | 19 | POL | 412 | LSWLSLDVSAA | 11 | | 2283 |
| 95 | 15 | POL | 3 | LSYQIIFRK | 8 | | 2284 |
| 75 | 15 | NUC | 137 | LTFGRETVLEY | 11 | | 2285 |
| 85 | 17 | POL | 99 | LTVNEKRR | 8 | −0.0002 | 2286 |
| 95 | 19 | ENV | 176 | LVLQAGFF | 8 | | 2287 |
| 100 | 20 | ENV | 339 | LVPFVQWF | 8 | 0.0028 | 2288 |
| 90 | 18 | NUC | 119 | LVSFGVWIR | 9 | | 2289 |
| 100 | 20 | POL | 377 | LWDFSQF | 8 | 0.0016 | 2290 |
| 100 | 20 | POL | 377 | LWDFSQFSR | 10 | | 2291 |
| 95 | 19 | ENV | 238 | MCLRRFIIF | 9 | | 2292 |
| 75 | 15 | ENV | 238 | MCLRRFIIFLF | 11 | | 2293 |
| 90 | 18 | POL | 539 | MDDWLGA | 8 | | 2294 |
| 90 | 18 | POL | 539 | MDDWLGAK | 9 | | 2295 |
| 90 | 18 | NUC | 30 | MDIDPYKEF | 9 | | 2296 |
| 90 | 18 | NUC | 30 | MDIDPYKEFGA | 11 | | 2297 |
| 80 | 16 | POL | 506 | MGVGLSPF | 8 | | 2298 |
| 80 | 16 | POL | 506 | MGVGLSPFLLA | 11 | | 2299 |
| 85 | 17 | ENV | 360 | MMWYWGPSLY | 10 | 0.0500 | 2300 |
| 80 | 16 | X | 103 | MSTTDLEA | 8 | | 2301 |
| 75 | 15 | X | 103 | MSTTDLEAY | 9 | 0.0008 | 2302 |
| 75 | 15 | X | 103 | MSTTDLEAYF | 10 | | 2303 |
| 75 | 15 | X | 103 | MSTTDLEAYFK | 11 | | 2304 |
| 95 | 19 | POL | 561 | NFLLSLGIH | 9 | | 2305 |
| 90 | 18 | NUC | 75 | NLEDPASR | 8 | −0.0002 | 2306 |
| 95 | 19 | POL | 45 | NLNVSIPWTH | 10 | | 2307 |
| 95 | 19 | POL | 45 | NLNVSIPWTHK | 11 | −0.0009 | 2308 |
| 95 | 15 | ENV | 15 | NLSVPNPLGF | 10 | | 2309 |
| 90 | 18 | POL | 411 | NLSWLSLDVSA | 11 | | 2310 |
| 75 | 15 | ENV | 215 | NSQSPTSNH | 9 | | 2311 |
| 90 | 18 | POL | 738 | NSVVLSRK | 8 | 0.0006 | 2312 |
| 90 | 18 | POL | 738 | NSVVLSRKY | 9 | 0.0020 | 2313 |
| 100 | 20 | POL | 47 | NVSIPWTH | 8 | | 2314 |
| 100 | 20 | POL | 47 | NVSIPWTHK | 9 | 0.0820 | 2315 |
| 90 | 18 | POL | 775 | PADDPSRGR | 9 | 0.0008 | 2316 |
| 95 | 19 | POL | 641 | PALMPLYA | 8 | | 2317 |
| 75 | 15 | X | 145 | PAPCNFFTSA | 10 | | 2318 |
| 80 | 16 | X | 11 | PARDVLCLR | 9 | 0.0002 | 2319 |
| 90 | 18 | POL | 355 | PARVTGGVF | 9 | | 2320 |
| 75 | 15 | ENV | 83 | PASTNRQSGR | 10 | | 2321 |
| 95 | 19 | NUC | 130 | PAYRPPNA | 8 | | 2322 |
| 90 | 18 | X | 68 | PCALRFTSA | 9 | | 2323 |
| 85 | 17 | X | 68 | PCALRFTSAR | 10 | | 2324 |
| 75 | 15 | X | 147 | PCNFFTSA | 8 | | 2325 |
| 95 | 19 | ENV | 15 | PDHQLDPA | 8 | | 2326 |
| 90 | 18 | ENV | 15 | PDHQLDPAF | 9 | | 2327 |
| 95 | 19 | POL | 512 | PFLLAQFTSA | 10 | | 2328 |
| 95 | 19 | POL | 634 | PFTQOGYPA | 9 | | 2329 |
| 100 | 20 | ENV | 233 | PGYRMMCLR | 9 | 0.0008 | 2330 |
| 95 | 19 | ENV | 233 | PGYRWMCLRR | 10 | 0.0048 | 2331 |
| 95 | 19 | ENV | 233 | PGYRWMCLRRF | 11 | | 2332 |
| 90 | 18 | POL | 616 | PIDWKVCQR | 9 | 0.0002 | 2333 |
| 100 | 20 | ENV | 380 | PIFFCLWVY | 9 | 0.0011 | 2334 |
| 85 | 17 | POL | 713 | PIHTAELLA | 9 | | 2335 |
| 85 | 17 | POL | 713 | PIHTAELLAA | 10 | | 2336 |
| 80 | 16 | POL | 496 | PIILGFRK | 8 | | 2337 |
| 100 | 20 | ENV | 314 | PIPSSWAF | 8 | | 2338 |
| 80 | 16 | ENV | 314 | PIPSSWAFA | 9 | | 2339 |
| 100 | 20 | POL | 124 | PLDKGIKPY | 9 | 0.0001 | 2340 |
| 100 | 20 | POL | 124 | PLDKGIKPYY | 10 | 0.0002 | 2341 |
| 95 | 19 | POL | 20 | PLEEELPR | 8 | 0.0002 | 2342 |
| 90 | 16 | POL | 20 | PLEEELPRLA | 10 | | 2343 |
| 90 | 19 | ENV | 10 | PLGFFPDH | 8 | | 2344 |
| 100 | 20 | POL | 427 | PLHPAAMPH | 9 | 0.0012 | 2345 |
| 95 | 19 | ENV | 174 | PLLVLQAGF | 9 | | 2346 |
| 95 | 19 | ENV | 174 | PLLVLQAGFF | 10 | | 2347 |
| 80 | 16 | POL | 711 | PLPIHTAELLA | 11 | | 2348 |
| 100 | 20 | POL | 2 | PLSYQHFR | 8 | −0.0002 | 2349 |
| 75 | 15 | POL | 2 | PLSYQHFRK | 9 | 0.0011 | 2350 |
| 85 | 17 | POL | 98 | PLTVNEKR | 8 | 0.0002 | 2351 |
| 85 | 17 | POL | 98 | PLTVNEKRR | 9 | 0.0008 | 2352 |
| 80 | 16 | POL | 505 | PMGVGLSPF | 9 | | 2353 |
| 85 | 17 | POL | 797 | PTTGRTSLY | 9 | 0.0001 | 2354 |
| 85 | 17 | POL | 797 | PTTGRTSLYA | 10 | | 2355 |
| 95 | 19 | X | 59 | PVCAFSSA | 8 | | 2356 |
| 90 | 18 | X | 20 | PVGAESRGR | 9 | 0.0002 | 2357 |
| 85 | 17 | POL | 612 | PVNRPIDWK | 9 | 0.0310 | 2358 |
| 95 | 19 | POL | 654 | QAFTFSPTY | 9 | 0.0030 | 2359 |
| 95 | 19 | POL | 654 | QAFTFSPTYK | 10 | 0.0450 | 2360 |
| 95 | 19 | POL | 654 | QAFTFSPTYKA | 11 | | 2361 |
| 80 | 16 | ENV | 179 | QAGFRLLTR | 9 | | 2362 |
| 80 | 16 | ENV | 107 | QAMQWNSTTF | 10 | | 2363 |
| 80 | 16 | ENV | 107 | QAMQWNSTTFH | 11 | | 2364 |
| 95 | 19 | POL | 637 | QCGYPALMPLY | 11 | | 2365 |
| 95 | 19 | POL | 517 | QFTSAICSVVR | 11 | | 2366 |
| 75 | 15 | NUC | 169 | QSPRRRRSQSR | 11 | | 2367 |
| 80 | 16 | POL | 189 | QSSGILSR | 8 | | 2368 |
| 95 | 19 | POL | 528 | RAFPHCLA | 8 | | 2369 |
| 95 | 19 | POL | 528 | RAFPHCLAF | 9 | 0.0015 | 2370 |
| 95 | 19 | POL | 528 | RAFPHCIAFSY | 11 | 0.1200 | 2371 |
| 85 | 17 | NUC | 28 | RDLLDTASA | 9 | | 2372 |
| 85 | 17 | NUC | 28 | RDLLDTASALY | 11 | | 2373 |
| 95 | 19 | X | 13 | RDVLCLRPVGA | 11 | | 2374 |
| 100 | 20 | ENV | 332 | RFSWLSLLVPF | 11 | | 2375 |
| 95 | 19 | X | 56 | RGLPVCAF | 8 | | 2376 |
| 95 | 19 | X | 56 | RGLPVCAFSSA | 11 | | 2377 |
| 100 | 20 | NUC | 152 | RGRSPRRR | 8 | | 2378 |
| 80 | 16 | POL | 762 | RGTSFVYVPSA | 11 | | 2379 |
| 90 | 18 | POL | 624 | RNGLLGF | 8 | | 2380 |
| 90 | 18 | POL | 624 | RIVGLLGFA | 9 | | 2381 |
| 90 | 18 | POL | 624 | RIVGLLGFAA | 10 | | 2382 |
| 75 | 15 | POL | 106 | RLKLIMPA | 8 | | 2383 |
| 75 | 15 | POL | 106 | RLKIMPAR | 9 | 0.0950 | 2384 |
| 75 | 15 | POL | 106 | RLKLIMPARF | 10 | | 2385 |
| 75 | 15 | POL | 106 | RLKLIMPARFY | 11 | | 2386 |
| 75 | 15 | X | 128 | RLKVFVLGGCR | 11 | | 2387 |
| 95 | 19 | POL | 376 | RLVVDFSQF | 9 | 0.0006 | 2388 |
| 95 | 19 | POL | 376 | RLVVDFSQFSR | 11 | 0.2800 | 2389 |
| 95 | 19 | NUC | 163 | RSPRRRTPSPR | 11 | −0.0007 | 2390 |
| 75 | 15 | NUC | 167 | RSQSPRRR | 8 | | 2391 |
| 75 | 15 | NUC | 167 | RSQSPRRRR | 9 | | 2392 |
| 90 | 18 | POL | 353 | RTPARVTGGVF | 11 | | 2393 |
| 95 | 19 | NUC | 127 | RTPPAYRPPNA | 11 | | 2394 |
| 95 | 19 | NUC | 188 | RTPSPRRR | 8 | −0.0002 | 2395 |
| 95 | 19 | NUC | 188 | RTPSPRRPR | 9 | 0.0054 | 2396 |
| 95 | 16 | POL | 818 | RVHFASPLH | 9 | | 2397 |
| 75 | 15 | POL | 818 | RVHFASPLHVA | 11 | | 2398 |
| 100 | 20 | POL | 357 | RVTGGVFIVDK | 11 | 0.0190 | 2399 |
| 90 | 18 | X | 65 | SAGPCALR | 8 | −0.0002 | 2400 |
| 90 | 18 | X | 65 | SAGPCALRF | 9 | −0.0003 | 2401 |
| 95 | 19 | POL | 520 | SAICSVVR | 8 | −0.0002 | 2402 |
| 95 | 19 | POL | 520 | SAICSVVRR | 9 | 0.0058 | 2403 |
| 95 | 19 | POL | 520 | SAICSWRRA | 10 | | 2404 |
| 95 | 19 | POL | 520 | SAICSWRRAF | 11 | | 2405 |
| 95 | 18 | POL | 771 | SALNPADDPSR | 11 | −0.0004 | 2406 |
| 90 | 20 | POL | 165 | SASFCGSPY | 9 | | 2407 |
| 100 | 18 | NUC | 121 | SFGVWIRTPPA | 11 | | 2408 |
| 90 | 19 | NUC | 46 | SFLPSDFF | 8 | | 2409 |
| 95 | 15 | POL | 748 | SFPWLGCA | 9 | | 2410 |
| 75 | 15 | POL | 740 | SFPWLLGCAA | 10 | | 2411 |
| 75 | 16 | POL | 765 | SFVWPSA | 8 | | 2412 |
| 80 | 20 | POL | 49 | SIPWTHKVGNF | 11 | | 2413 |
| 100 | 19 | ENV | 194 | SLDSWWTSINF | 11 | | 2414 |
| 95 | 19 | POL | 416 | SLDVSAAF | 8 | | 2415 |
| 95 | 19 | POL | 416 | SIQVSAAFY | 9 | 0.0016 | 2416 |
| 95 | 19 | POL | 416 | SLDVSAAFYH | 10 | | 2417 |
| 75 | 15 | POL | 565 | SIGIHLNPNK | 10 | | 2418 |
| 100 | 20 | ENV | 337 | SLLVPFVQWF | 10 | | 2419 |
| 95 | 19 | X | 54 | SLRGLPVCA | 9 | | 2420 |
| 95 | 19 | X | 54 | SLRGLPVCAF | 10 | 0.0004 | 2421 |
| 95 | 18 | X | 64 | SSAGPCALR | 9 | 0.0080 | 2422 |
| 90 | 18 | X | 64 | SSAGPCALRF | 10 | −0.0003 | 2423 |
| 90 | 19 | NUC | 170 | STIPETTVVR | 10 | 0.0007 | 2424 |
| 95 | 19 | NUC | 170 | STLPETTWRR | 11 | 0.0150 | 2425 |
| 95 | 16 | ENV | 85 | STNRQSGR | 8 | | 2426 |
| 80 | 15 | X | 104 | STTDLEAY | 8 | | 2427 |
| 75 | 15 | X | 104 | STTDLEAYF | 9 | | 2428 |
| 75 | 15 | X | 104 | STTDLEAYFK | 10 | 0.0066 | 2429 |
| 75 | 15 | ENV | 17 | SVPNPLGF | 8 | | 2430 |
| 90 | 18 | POL | 739 | SVVLSRKY | 8 | −0.0002 | 2431 |
| 85 | 17 | POL | 739 | SVVLSRKYTSF | 11 | | 2432 |
| 95 | 19 | POL | 524 | SVVRRAFPH | 9 | 0.1100 | 2433 |
| 85 | 17 | POL | 716 | TAELLAACF | 9 | | 2434 |
| 85 | 17 | POL | 716 | TAELLAACFA | 10 | | 2435 |
| 85 | 17 | POL | 716 | TAELLAACFAR | 11 | 0.0006 | 2436 |
| 80 | 16 | NUC | 33 | TASALYREA | 9 | | 2437 |
| 100 | 20 | ENV | 311 | TCIPIPSSWA | 10 | | 2438 |
| 100 | 20 | ENV | 311 | TCIPIPSSWAF | 11 | | 2439 |
| 80 | 16 | X | 106 | TDLEAYFK | 8 | | 2440 |
| 90 | 18 | POL | 736 | TDNSVVLSR | 9 | | 2441 |
| 90 | 18 | POL | 736 | TDNSVVLSRK | 10 | 0.0006 | 2442 |
| 90 | 18 | POL | 736 | TDNSVVLSRKY | 11 | | 2443 |
| 75 | 15 | NUC | 138 | TFGRETVLEY | 10 | | 2444 |
| 95 | 19 | POL | 657 | TFSPTYKA | 8 | | 2445 |
| 95 | 19 | POL | 857 | TFSPTYKAF | 9 | | 2446 |
| 100 | 20 | POL | 359 | TGGVFLVQK | 9 | 0.0007 | 2447 |
| 85 | 17 | POL | 799 | TGRTSLYA | 6 | | 2448 |
| 95 | 19 | NUC | 171 | TLPETTVVR | 9 | 0.0008 | 2449 |
| 95 | 19 | NUC | 171 | TLPETTVVRR | 10 | 0.0007 | 2450 |
| 95 | 19 | NUC | 171 | TLPETTVVRRR | 11 | 0.0005 | 2451 |
| 100 | 20 | POL | 150 | TLWKAGILY | 9 | 0.1300 | 2452 |
| 100 | 20 | P0L | 150 | TLWKAGILYK | 10 | 5.3000 | 2453 |
| 100 | 20 | POL | 150 | TLWKAGILYKR | 11 | 0.0082 | 2454 |
| 95 | 19 | POL | 519 | TSAICSVVR | 9 | 0.0005 | 2455 |
| 95 | 19 | POL | 519 | TSAICSVVRR | 10 | 0.0018 | 2456 |
| 95 | 19 | POL | 519 | TSAICSVVRRA | 11 | | 2457 |
| 75 | 15 | POL | 747 | TSFPWLLGCA | 10 | | 2458 |
| 75 | 15 | POL | 747 | TSFPWLLGCAA | 11 | | 2459 |
| 80 | 16 | POL | 764 | TSFVYVPSA | 9 | | 2460 |
| 75 | 15 | X | 105 | TTDLEAYF | 8 | | 2461 |
| 75 | 15 | X | 105 | TTDLEAVFK | 9 | 0.0006 | 2462 |
| 85 | 17 | POL | 798 | TTGRTSLY | 8 | 0.0004 | 2463 |
| 85 | 17 | POL | 798 | TTGRTSLYA | 9 | | 2464 |
| 75 | 15 | ENV | 278 | TTSTGPCK | 8 | | 2465 |
| 80 | 16 | NUC | 175 | TTVVRRRGR | 9 | 0.0008 | 2466 |
| 80 | 16 | NUC | 176 | TVVRRRGR | 8 | 0.0003 | 2467 |
| 80 | 16 | NUC | 176 | TVVRRRGRSPR | 11 | | 2468 |
| 95 | 19 | X | 60 | VCAFSSAGPCA | 11 | | 2469 |
| 85 | 17 | POL | 621 | VCQRNGLLGF | Ii | | 2470 |
| 100 | 20 | POL | 379 | VDFSQFSR | 8 | | 2471 |
| 100 | 20 | POL | 362 | VFLVDKNPH | 9 | | 2472 |
| 80 | 16 | X | 131 | VFVLGGCR | 8 | | 2473 |
| 80 | 16 | X | 131 | VFVLGGCRH | 9 | | 2474 |
| 75 | 15 | X | 131 | VFVLGGCRHK | 10 | | 2475 |
| 95 | 19 | X | 21 | VGAESRGR | 8 | | 2476 |
| 95 | 19 | POL | 626 | VGLLGFAA | 8 | | 2477 |
| 95 | 19 | POL | 626 | VGLLGFAAPF | 10 | | 2478 |
| 80 | 16 | POL | 508 | VGLSPFLLA | 9 | | 2479 |
| 80 | 16 | POL | 508 | VGLSPFLLAQF | 11 | | 2480 |
| 95 | 19 | POL | 56 | VGNFTGLY | 8 | | 2481 |
| 85 | 17 | POL | 96 | VGPLTVNEK | 9 | 0.0007 | 2482 |
| 85 | 17 | POL | 96 | VGPLTVNEKR | 10 | | 2483 |
| 85 | 17 | POL | 96 | VGPLTVNEKRR | 11 | | 2484 |
| 95 | 19 | X | 15 | VLCLRPVGA | 9 | | 2485 |
| 95 | 19 | POL | 543 | VLGAKSVQH | 9 | | 2486 |
| 90 | 18 | X | 133 | VLGGCRHK | 8 | 0.0150 | 2487 |
| 80 | 16 | ENV | 177 | VLQAGFFLLTR | 11 | | 2488 |
| 85 | 17 | POL | 741 | VLSRKYTSF | 9 | | 2489 |
| 90 | 18 | NUC | 120 | VSFGVWIR | 8 | 0.0040 | 2490 |
| 100 | 20 | POL | 48 | VSIPWTHK | 8 | 0.0130 | 2491 |
| 100 | 20 | POL | 358 | VTGGVFLVDK | 10 | 0.0390 | 2492 |
| 100 | 20 | POL | 378 | VVDFSQFSR | 9 | 0.0015 | 2493 |
| 90 | 18 | POL | 542 | VVLGAKSVQH | 10 | | 2494 |
| 85 | 17 | POL | 740 | VVLSRKYTSF | 10 | 0.0004 | 2495 |
| 95 | 19 | POL | 525 | VVRRAFPH | 8 | | 2496 |
| 95 | 19 | POL | 525 | VVRRAFPHCLA | 11 | | 2497 |
| 80 | 16 | NUC | 177 | WRRRGRSPR | 10 | 0.0027 | 2498 |
| 80 | 16 | NUC | 177 | WRRRGRSPRR | 11 | | 2499 |
| 90 | 18 | NUC | 102 | WFHISCLTF | 9 | | 2500 |
| 90 | 18 | NUC | 102 | WFHISCLTFGR | 11 | | 2501 |
| 85 | 17 | NUC | 28 | WGMDIDPY | 8 | | 2502 |
| 85 | 17 | NUC | 28 | WGMDIDPYK | 9 | −0.0003 | 2503 |
| 85 | 17 | NUC | 28 | WGMDIDPYKEF | 11 | | 2504 |
| 85 | 17 | POL | 578 | WGYSLNFMGY | 10 | | 2505 |
| 80 | 16 | POL | 759 | WILRGTSF | 8 | | 2506 |
| 80 | 16 | POL | 759 | WILRGTSFVY | 10 | 0.0076 | 2507 |
| 95 | 19 | NUC | 125 | WIRTPPAY | 8 | −0.0002 | 2508 |
| 95 | 19 | NX | 125 | WIRTPPAYR | 9 | 0.0008 | 2509 |
| 90 | 18 | POL | 314 | WLQFRNSK | 8 | −0.0002 | 2510 |
| 100 | 20 | POL | 414 | WLSLDVSA | 8 | | 2511 |
| 95 | 19 | POL | 414 | WLSLDVSAA | 9 | | 2512 |
| 95 | 19 | POL | 414 | WLSLDVSAAF | 10 | | 2513 |
| 95 | 19 | POL | 414 | WISLDVSAAFY | 11 | 0.0034 | 2514 |
| 100 | 20 | ENV | 335 | WLSLLVPF | 8 | | 2515 |
| 85 | 17 | NUC | 26 | WLWGMDIDPY | 10 | 0.0002 | 2516 |
| 85 | 17 | NUC | 26 | WLWGMDIDPYK | 11 | 0.0030 | 2517 |
| 95 | 19 | ENV | 237 | WMCLRRFIIF | 10 | 0.0004 | 2518 |
| 85 | 17 | ENV | 359 | WMMWYWGPSLY | 11 | 0.0009 | 2519 |
| 100 | 20 | POL | 52 | WTHKVGNF | 8 | | 2520 |
| 100 | 20 | POL | 147 | YLHTLWKA | 8 | | 2521 |
| 100 | 20 | POL | 122 | YLPLDKGIK | 9 | 0.0001 | 2522 |
| 100 | 20 | POL | 122 | YLPLDKGIKPY | 11 | −0.0004 | 2523 |
| 90 | 18 | NUC | 118 | YLVSFGVWIR | 10 | 0.0005 | 2524 |
| 90 | 18 | POL | 538 | YMDDVVLGA | 9 | 0.0001 | 2525 |
| 90 | 18 | POL | 538 | YMDDWLGAK | 10 | 0.0330 | 2526 |
| 80 | 16 | POL | 493 | YSHPIILGF | 9 | | 2527 |
| 80 | 18 | POL | 493 | YSHPIILGFR | 10 | | 2528 |
| 80 | 16 | POL | 493 | YSHIPIILGFR | 11 | | 2529 |
| | | | | K | | | |
| 85 | 17 | POL | 580 | YSLNFMGY | 8 | −0.0002 | 2530 |
| 75 | 15 | POL | 746 | YTSFPWLLGCA | 11 | | 2531 |
| 90 | 18 | POL | 768 | YVPSALNPA | 9 | | 2532 |

[0432] TABLE XVII

A11 Motif With Binding Information

| | | | | | | | |
|---|---|---|---|---|---|---|---|
| Conservancy | Frequency | Protein | Position | Sequence | AA | A*1101 | Seq ID Num |

| | | | | | | |
|---|---|---|---|---|---|---|
| 85 | 17 | POL | 721 | AACFARSR | 8 | 2533 |
| 95 | 19 | POL | 632 | AAPFTQCGY | 9 | 2534 |
| 90 | 18 | | 778 | ADDPSRGR | 8 | 2535 |
| 95 | 19 | POL | 529 | AFPHCLAFSY | 10 | 2538 |
| 90 | 19 | X | 62 | AFSSAGPCALR | 11 | 2537 |
| 95 | 19 | POL | 655 | AFTFSPTY | 8 | 2538 |
| 95 | 19 | POL | 655 | AFTFSPTYK | 9 | 2539 |
| 80 | 16 | ENV | 180 | AGFFLLTR | 8 | 2540 |
| 95 | 19 | POL | 18 | AGPLEEELPR | 10 | 2541 |
| 95 | 19 | POL | 521 | AICSVVRR | 8 | 2542 |
| 95 | 19 | NUC | 41 | ALESPEHCSPH | 11 | 2543 |
| 90 | 18 | POL | 772 | ALNPADDPSR | 10 | 2544 |
| 85 | 17 | X | 70 | ALRFTSAR | 8 | 2545 |
| 80 | 16 | ENV | 108 | AMQWNSTTFH | 10 | 2546 |
| 80 | 8 | POL | 166 | AFCGSPY | 8 | 2547 |
| 80 | 16 | POL | 822 | ASPLHVAWR | 9 | 2548 |
| 75 | 15 | ENV | 84 | ASTNRQSGR | 9 | 2549 |
| 80 | 16 | POL | 755 | CAANWILR | 8 | 2550 |
| 85 | 17 | X | 69 | CALRFTSAR | 9 | 2551 |
| 80 | 16 | X | 6 | CCQLDPAR | 8 | 2552 |
| 75 | 15 | POL | 607 | CFRKLPVNR | 9 | 2553 |
| 95 | 19 | POL | 638 | CGYPALMPLY | 10 | 2554 |
| 95 | 19 | ENV | 253 | CLIFLLVLLDY | 11 | 2555 |
| 90 | 18 | X | 17 | CLRPVGAESR | 10 | 2556 |
| 100 | 20 | NUC | 48 | CSPHHTALR | 9 | 2557 |
| 95 | 19 | POL | 523 | CSVVRRAFPH | 10 | 2558 |
| 90 | 18 | POL | 540 | DDVVLGAK | 8 | 2559 |
| 85 | 17 | NUC | 29 | DLLDTASALY | 10 | 2560 |
| 85 | 17 | NUC | 29 | DLLDTASALYR | 11 | 2561 |
| 90 | 18 | POL | 737 | DNSVVLSR | 8 | 2562 |
| 90 | 18 | POL | 787 | DNSVVLSRK | 9 | 2562 |
| 90 | 18 | POL | 737 | DNSVVLSRKY | 10 | 2533 |
| 85 | 17 | NUC | 32 | DTASALYR | 8 | 2534 |
| 95 | 19 | POL | 418 | DVSAAFYH | 8 | 2535 |
| 90 | 18 | POL | 541 | DVVLGAKSVQH | 11 | 2536 |
| 95 | 19 | POL | 17 | EAGPLEEELPR | 11 | 2537 |
| 90 | 18 | NUC | 40 | EALESPEH | 8 | 2538 |
| 90 | 18 | POL | 718 | ELLAACFAR | 9 | 2539 |
| 85 | 17 | POL | 718 | ELLAACFARSR | 11 | 2540 |
| 95 | 19 | NUC | 43 | ESPEHCSPH | 9 | 2541 |
| 95 | 19 | NUC | 43 | ESPEHCSPHH | 10 | 2542 |
| 95 | 19 | NUC | 174 | ETTVVRRR | 8 | 2543 |
| 80 | 16 | NUC | 174 | ETTWRRRGR | 10 | 2544 |
| 95 | 19 | POL | 631 | FAAPFTQCGY | 10 | 2545 |
| 80 | 16 | POL | 821 | FASPLHVAWR | 10 | 2546 |
| 75 | 15 | NUC | 139 | FGRETVLEY | 9 | 2547 |
| 75 | 15 | POL | 244 | FGVEPSGSGH | 10 | 2548 |
| 95 | 19 | NUC | 122 | FGVWIRTPPAY | 11 | 2549 |
| 95 | 19 | POL | 562 | FLLSLGIH | 8 | 2550 |
| 95 | 19 | ENV | 256 | FLLVLLDY | 8 | 2551 |
| 100 | 20 | POL | 363 | FLVDKVPH | 8 | 2552 |
| 90 | 18 | X | 83 | FSSAGPCALR | 10 | 2553 |
| 95 | 19 | POL | 656 | FTFSPTYK | 8 | 2554 |
| 95 | 19 | POL | 518 | FTSAICSVVR | 10 | 2555 |
| 95 | 19 | POL | 518 | FTSAICSVVRR | 11 | 2556 |
| 95 | 19 | X | 132 | FVLGGCRH | 6 | 2557 |
| 90 | 18 | X | 132 | FVLGGCRHK | 9 | 2558 |
| 80 | 16 | POL | 754 | GCAANWILR | 9 | 2559 |
| 95 | 19 | POL | 630 | GFAAPFTQCGY | 11 | 2560 |
| 100 | 20 | POL | 360 | GGVFLVDK | 8 | 2561 |
| 100 | 20 | POL | 360 | GGVFLVDKNPH | 11 | 2562 |
| 75 | 15 | POL | 567 | GIHLNPNK | 8 | 2563 |
| 75 | 15 | POL | 567 | GIHLNPNKTK | 10 | 2564 |
| 75 | 15 | POL | 567 | GIHLNPNKTKR | 11 | 2565 |
| 85 | 17 | NUC | 29 | GMDIDPYK | 8 | 2566 |
| 95 | 19 | POL | 44 | GNLNVSIPWTH | 11 | 2567 |
| 90 | 18 | POL | 735 | GTDNSVVLSR | 10 | 2568 |
| 90 | 18 | POL | 735 | GTDNSVVLSRK | 11 | 2569 |
| 80 | 16 | POL | 245 | GVEPSGSGH | 9 | 2570 |
| 100 | 20 | POL | 361 | GVFLVDKNPH | 10 | 2571 |
| 95 | 19 | NUC | 123 | GVWIRTPPAY | 10 | 2572 |
| 95 | 19 | NUC | 123 | GVWIRTPPAYR | 11 | 2573 |
| 100 | 20 | NUC | 47 | HCSPHHTALR | 10 | 2574 |
| 80 | 16 | POL | 820 | HFASPLHVAWR | 11 | 2575 |
| 95 | 19 | X | 49 | HGAHLSLR | 8 | 2576 |
| 90 | 18 | NUC | 104 | HISCLTFGR | 9 | 2577 |
| 75 | 15 | POL | 569 | HLNPNKTK | 8 | 2578 |
| 75 | 15 | POL | 569 | HLNPNKTKR | 9 | 2579 |
| 100 | 20 | POL | 149 | HTLWKAGILY | 10 | 2580 |
| 100 | 20 | POL | 149 | HTLWKAGILYK | 11 | 2581 |
| 95 | 19 | POL | 522 | ICSVVRRAFPH | 11 | 2582 |
| 90 | 18 | POL | 617 | IDWKVCQR | 8 | 2583 |
| 100 | 20 | ENV | 381 | IFFCLWVY | 8 | 2584 |
| 95 | 19 | ENV | 255 | IFLLVLLDY | 9 | 2585 |
| 80 | 16 | POL | 734 | IGTDNSVVLSR | 11 | 2588 |
| 80 | 16 | POL | 760 | ILRGTSFVY | 9 | 2587 |
| 90 | 18 | NUC | 105 | ISCLTFGR | 8 | 2588 |
| 100 | 20 | POL | 153 | KAGILYKR | 8 | 2589 |
| 75 | 15 | POL | 108 | KLIMPARFY | 9 | 2590 |
| 80 | 16 | POL | 610 | KLPVNRPIDWK | 11 | 2591 |
| 75 | 15 | X | 130 | KVFVLGGCR | 9 | 2592 |
| 75 | 15 | X | 130 | KVFVLGGCRH | 10 | 2593 |
| 95 | 19 | POL | 55 | KVGNFTGLY | 9 | 2594 |
| 85 | 17 | POL | 720 | LAACFARSR | 9 | 2595 |
| 90 | 18 | X | 16 | LCLRPVGAESR | 11 | 2596 |
| 100 | 20 | POL | 125 | LDKGIKPY | 8 | 2597 |
| 100 | 20 | POL | 125 | LDKGIKPYY | 9 | 2598 |
| 80 | 16 | X | 9 | LDPARDVLCLR | 11 | 2599 |
| 85 | 17 | NUC | 31 | LDTASALY | 8 | 2600 |
| 85 | 17 | NUC | 31 | LDTASALYR | 9 | 2601 |
| 95 | 19 | POL | 417 | LDVSAAFY | 8 | 2802 |
| 95 | 19 | POL | 417 | LDVSAAFYH | 9 | 2603 |
| 95 | 19 | POL | 544 | LGAKSVQH | 8 | 2604 |
| 80 | 16 | POL | 753 | LGCAANWILR | 10 | 2605 |
| 75 | 15 | POL | 566 | LGIHLNPNK | 9 | 2606 |
| 75 | 15 | POL | 566 | LGIHLNPNKTK | 11 | 2607 |
| 95 | 19 | ENV | 254 | LIFLLVLLDY | 10 | 2608 |
| 100 | 20 | POL | 109 | LIMPARFY | 8 | 2609 |
| 90 | 18 | POL | 719 | LLAACFAR | 8 | 2610 |
| 85 | 17 | POL | 719 | LLAACFARSR | 10 | 2811 |
| 85 | 17 | NUC | 30 | LLDTASALY | 9 | 2812 |
| 85 | 17 | NUC | 30 | LLDTASALYR | 10 | 2613 |
| 80 | 16 | POL | 752 | LLGCAANWILR | 11 | 2814 |
| 100 | 20 | ENV | 378 | LLPIFFCLWVY | 11 | 2615 |
| 90 | 18 | POL | 773 | LNPADDPSR | 9 | 2616 |
| 90 | 18 | POL | 773 | LNPADDPSRGR | 11 | 2617 |
| 75 | 15 | POL | 570 | LNPNKTKR | 8 | 2618 |
| 75 | 15 | POL | 570 | LNPNKTKRWGY | 11 | 2819 |
| 95 | 19 | POL | 46 | LNVSIPWTH | 11 | 2620 |
| 95 | 19 | POL | 46 | LNVSIPWTHK | 10 | 2621 |
| 95 | 19 | POL | 415 | LSLDVSAAFY | 10 | 2622 |
| 95 | 19 | POL | 415 | LSLDVSAAFYH | 11 | 2623 |
| 75 | 15 | POL | 564 | LSLGIHLNPNK | 11 | 2624 |
| 95 | 19 | NUC | 169 | LSTLPETTVVR | 11 | 2825 |
| 75 | 15 | POL | 3 | LSYQHFRK | 8 | 2626 |
| 75 | 15 | NUC | 137 | LTFGRETVLEY | 11 | 2627 |
| 85 | 17 | POL | 99 | LTVNEKRR | 8 | 2628 |
| 90 | 18 | NUC | 119 | LVSFGVWIR | 9 | 2629 |
| 100 | 20 | POL | 377 | LVVDFSQFSR | 10 | 2630 |
| 90 | 18 | POL | 539 | MDDVVLGAK | 9 | 2631 |
| 85 | 17 | ENV | 360 | MMWYWGPSLY | 10 | 2632 |
| 75 | 15 | X | 103 | MSTTDLEAY | 9 | 2633 |
| 75 | 15 | X | 103 | MSTTDLEAYFK | 11 | 2634 |
| 95 | 19 | POL | 561 | NFLLSLGIH | 9 | 2635 |
| 90 | 18 | NUC | 75 | NLEDPASR | 8 | 2636 |
| 95 | 19 | POL | 45 | NLNVSIPWTH | 10 | 2637 |
| 95 | 19 | POL | 45 | NLNVSIPWTHK | 11 | 2638 |
| 75 | 15 | ENV | 215 | NSQSPTSNH | 9 | 2639 |
| 90 | 18 | POL | 738 | NSVVLSRK | 8 | 2640 |
| 90 | 16 | POL | 736 | NSVVLSRKY | 9 | 2641 |
| 100 | 20 | POL | 47 | NVSIPWTH | 8 | 2642 |
| 100 | 20 | POL | 47 | NVSIPWTHK | 9 | 2643 |
| 90 | 18 | POL | 775 | PADDPSRGR | 9 | 2644 |
| 80 | 16 | X | 11 | PARDVLCLR | 9 | 2645 |
| 75 | 15 | ENV | 83 | PASTNRQSGR | 10 | 2646 |
| 85 | 17 | X | 68 | PCALRFTSAR | 10 | 2647 |
| 100 | 20 | ENV | 233 | PGYRWMCLR | 9 | 2648 |
| 95 | 19 | ENV | 233 | PGYRWMCLRR | 10 | 2649 |
| 90 | 18 | POL | 616 | PIDWKVCQR | 9 | 2650 |
| 100 | 20 | ENV | 360 | PIFFCLWVY | 9 | 2651 |
| 80 | 16 | POL | 496 | PILGFRK | 8 | 2652 |
| 100 | 20 | POL | 124 | PLDKGIKPY | 9 | 2653 |
| 100 | 20 | POL | 124 | PLDKGIKPTY | 10 | 2654 |
| 95 | 19 | POL | 20 | PLEEELPR | 8 | 2655 |
| 95 | 19 | POL | 10 | PLGFFPDH | 8 | 2658 |
| 100 | 20 | POL | 427 | PLHPAAMPH | 9 | 2657 |
| 100 | 20 | POL | 2 | PLSYQHFR | 8 | 2858 |
| 75 | 15 | POL | 2 | PLSYQHFRK | 9 | 2659 |
| 85 | 17 | POL | 98 | PLTVNEKR | 8 | 2660 |
| 85 | 17 | POL | 98 | PLTVNEKRR | 9 | 2661 |
| 75 | 15 | POL | 572 | PNKTKRWGY | 9 | 2662 |
| 85 | 17 | POL | 797 | PTTGRTSLY | 9 | 2663 |
| 90 | 18 | X | 20 | PVGAESRGR | 9 | 2664 |
| 85 | 17 | POL | 612 | PVNRPIDWK | 9 | 2685 |
| 95 | 19 | PCI | 654 | QAFTFSPTY | 9 | 2666 |
| 95 | 19 | POL | 654 | QAFTFSPTYK | 10 | 2687 |
| 80 | 16 | ENV | 179 | QAGFFLLTR | 9 | 2668 |
| 80 | 16 | ENV | 107 | QAMQWNSTTFH | 10 | 2669 |
| 95 | 19 | POL | 637 | QCGYPALMPLY | 11 | 2670 |
| 95 | 19 | POL | 517 | QFTSAICSVVR | 11 | 2671 |
| 75 | 15 | NUC | 169 | QSPRRRRSQSR | 11 | 2672 |
| 80 | 16 | POL | 189 | QSSGILSR | 8 | 2673 |
| 95 | 19 | POL | 528 | RAFPHCLAFSY | 11 | 2674 |
| 85 | 17 | NUC | 28 | RDLLDTASALY | 11 | 2675 |
| 100 | 20 | NUC | 152 | RGRSPRRR | 8 | 2676 |
| 75 | 15 | POL | 106 | RLKLIMPAR | 9 | 2677 |
| 75 | 15 | POL | 106 | RLKLIMPARFY | 11 | 2678 |
| 75 | 15 | X | 128 | RLKVFVLGGCR | 11 | 2679 |
| 95 | 19 | POL | 376 | RLVVDFSQFSR | 11 | 2680 |
| 95 | 19 | NUC | 183 | RSPRRRTPSPR | 11 | 2681 |
| 75 | 15 | NUC | 167 | RSQSPRRR | 8 | 2682 |
| 75 | 15 | NUC | 167 | RSQSPRRR | 9 | 2683 |
| 95 | 19 | NUC | 188 | RTPSPRRR | 8 | 2684 |
| 95 | 19 | NUC | 188 | RTPSPRRR | 9 | 2685 |
| 80 | 16 | POL | 818 | RVHFASPLH | 9 | 2686 |
| 100 | 20 | POL | 357 | RVTGGVFLVDK | 11 | 2687 |
| 90 | 18 | X | 64 | SAGPCALR | 8 | 2688 |
| 95 | 19 | POL | 520 | SAICSVVR | 8 | 2689 |
| 95 | 19 | POL | 520 | SAICSVVRR | 9 | 2690 |
| 90 | 18 | POL | 771 | SALNPADDPSR | 11 | 2691 |
| 100 | 20 | POL | 165 | SASFQGSPY | 9 | 2692 |
| 95 | 19 | POL | 416 | SLDVSAAFY | 9 | 2693 |
| 95 | 19 | POL | 416 | SLDVSAAFYH | 10 | 2694 |
| 75 | 15 | POL | 565 | SLGIHLNPNK | 10 | 2695 |
| 90 | 18 | X | 641 | SSAGPCALR | 9 | 2696 |
| 95 | 19 | NUC | 170 | STLPETTVVR | 10 | 2697 |
| 95 | 19 | NUC | 170 | STLPETTVVRR | 11 | 2698 |
| 80 | 16 | ENV | 85 | STNRQSGR | 8 | 2699 |
| 75 | 15 | X | 104 | STTDLEAY | 8 | 2700 |
| 75 | 15 | X | 104 | STTDLEAYFK | 10 | 2701 |
| 90 | 18 | POL | 739 | SVVLSRKY | 8 | 2702 |
| 95 | 19 | POL | 524 | SVVRRAFPH | 9 | 2703 |
| 85 | 17 | POL | 716 | TAELLAACFAR | 11 | 2704 |
| 80 | 16 | X | 106 | TDLEAYFK | 8 | 2705 |
| 90 | 18 | POL | 736 | TDNSVVLSR | 9 | 2706 |
| 90 | 18 | POL | 736 | TDNSVVLSRK | 10 | 2707 |
| 90 | 18 | POL | 736 | TDNSVVLSRKY | 11 | 2708 |
| 75 | 15 | NUC | 138 | TFGRETVLEY | 10 | 2709 |
| 100 | 20 | POL | 359 | TGGVFLVDK | 9 | 2710 |
| 95 | 19 | NUC | 171 | TLPETTVVR | 9 | 2711 |
| 95 | 19 | NUC | 171 | TLPETTVVRR | 10 | 2712 |
| 95 | 19 | NUC | 171 | TLPETTVVRRR | 11 | 2713 |
| 100 | 20 | POL | 150 | TLWKAGILY | 9 | 2714 |
| 100 | 20 | POL | 150 | TLWKAGILYK | 10 | 2715 |
| 100 | 20 | POL | 150 | TLWKAGILYKR | 11 | 2716 |
| 95 | 19 | POL | 560 | TNFLLSLGIH | 10 | 2717 |
| 95 | 19 | POL | 519 | TSAICSVVR | 9 | 2718 |
| 95 | 19 | POL | 519 | TSAICSVVRR | 10 | 2719 |
| 75 | 15 | X | 105 | TTDLEAYFK | 9 | 2720 |
| 85 | 17 | POL | 798 | TTGRTSLY | 8 | 2721 |
| 75 | 15 | ENV | 278 | TTSTGPCK | 8 | 2722 |
| 80 | 16 | NUC | 175 | TTVVRRRGR | 9 | 2723 |
| 80 | 16 | NUC | 176 | TVVRRRGR | 8 | 2724 |
| 80 | 16 | NUC | 178 | TVVRRRGRSPR | 11 | 2725 |
| 100 | 20 | POL | 379 | VDFSQFSR | 8 | 2726 |
| 100 | 20 | POL | 362 | VFLVDKNPH | 9 | 2727 |
| 80 | 16 | X | 131 | VFVLGGCR | 8 | 2728 |
| 80 | 16 | X | 131 | VFVLGGCRH | 9 | 2729 |
| 75 | 15 | X | 131 | VFVLGGCRHK | 10 | 2730 |
| 95 | 19 | X | 21 | VGAESRGR | 8 | 2731 |
| 95 | 19 | POL | 56 | VGNFTGLY | 8 | 2732 |
| 85 | 17 | POL | 96 | VGPLTVNEK | 9 | 2733 |
| 85 | 17 | POL | 96 | VGPLTVNEKR | 10 | 2734 |
| 85 | 17 | POL | 96 | VGPLTVNEKRR | 11 | 2735 |
| 95 | 19 | POL | 543 | VLGAKSVQH | 9 | 2736 |
| 90 | 18 | X | 133 | VLGGCRH | 8 | 2737 |
| 80 | 16 | ENV | 177 | VLQAGFFLLTR | 11 | 2738 |
| 85 | 17 | POL | 613 | VNRPIDWK | 8 | 2739 |
| 90 | 18 | NUC | 120 | VSFGVWIR | 8 | 2740 |
| 100 | 20 | POL | 48 | VSIPWTHK | 8 | 2741 |
| 100 | 20 | POL | 358 | VTGGVFLVDK | 10 | 2742 |
| 100 | 20 | POL | 378 | VVDFSQFSR | 9 | 2743 |
| 90 | 18 | POL | 542 | VVLGAKSVQH | 10 | 2744 |
| 95 | 19 | POL | 525 | VVRRAFPH | 8 | 2745 |
| 80 | 16 | NUC | 177 | VVRRRGRSPR | 10 | 2746 |
| 80 | 16 | NUC | 177 | VRRRGRSPRR | 11 | 2747 |
| 90 | 18 | NUC | 102 | WFHISCLTFGR | 11 | 2748 |
| 85 | 17 | NUC | 28 | WGMDIDPY | 8 | 2749 |
| 85 | 17 | NUC | 28 | WGMDIDPYK | 9 | 2750 |
| 85 | 17 | POL | 578 | WGYSLNFMGY | 10 | 2751 |
| 80 | 16 | POL | 759 | WILRGTSFVY | 10 | 2752 |
| 95 | 19 | NUC | 125 | WIRTPPAY | 8 | 2753 |
| 95 | 19 | NUC | 125 | WIRTPPAYR | 9 | 2754 |
| 90 | 18 | POL | 314 | WLQFRNSK | 8 | 2755 |
| 95 | 19 | POL | 414 | WLSLDVSAAFY | 11 | 2756 |
| 85 | 17 | NUC | 26 | WLWGMDIDPY | 10 | 2757 |
| 85 | 17 | NUC | 26 | WLWGMDIDPYK | 11 | 2758 |
| 85 | 17 | ENV | 359 | WMMWYWGPSLY | 11 | 2759 |
| 100 | 20 | POL | 122 | YLPDKGIK | 9 | 2760 |
| 100 | 20 | POL | 122 | YLPLDKGIKPY | 11 | 2761 |
| 90 | 18 | NUC | 118 | YLVSFGVWIR | 10 | 2782 |
| 90 | 18 | POL | 538 | YMDDVVLGAK | 10 | 2783 |
| 80 | 16 | POL | 493 | YSHPIILGFR | 10 | 2764 |
| 60 | 16 | POL | 493 | YSHPIILGFRK | 11 | 2765 |
| 85 | 17 | POL | 580 | YSLNFMGY | 8 | 2766 |

[0433] TABLE XVIII

HBV A24 Motif With Binding Information

| | | | | | | | | |
|---|---|---|---|---|---|---|---|---|
| | | | | | SEQ ID | | | |
| Conservancy | Freq. | Protein | Position | Sequence | NO: | AA | Filed | A*2401 |

| | | | | | | | | |
|---|---|---|---|---|---|---|---|---|
| 95 | 19 | POL | 529 | AFPHCLAF | 2767 | 8 | | |
| 95 | 19 | X | 82 | AFSSAGPCAL | 2768 | 10 | | 0.0012 |
| 90 | 18 | POL | 535 | AFSYMDDVVL | 2769 | 10 | | 0.0009 |
| 95 | 19 | POL | 655 | AFTFSPTYKAF | 2770 | 11 | | |
| 80 | 16 | ENN | 108 | AMQWNSTTF | 2771 | 9 | | |
| 100 | 20 | NUC | 131 | AYRPPNAPI | 2772 | 9 | — | 0.0310 |
| 100 | 20 | NUC | 131 | AYRPPNAPIL | 2773 | 10 | — | 0.0042 |
| 75 | 15 | POL | 807 | CFRKLPVNRPI | 2774 | 11 | | |
| 85 | 17 | POL | 618 | DWKVCQRI | 2775 | 8 | | |
| 85 | 17 | POL | 618 | DWKVCQRPIVGL | 2776 | 11 | | |
| 90 | 18 | ENV | 262 | DYQGMLPVCPL | 2777 | 11 | | 0.0002 |
| 90 | 18 | NUC | 117 | EYLVSFGVW | 2778 | 9 | — | |
| 90 | 18 | NUC | 117 | EYLVSFGVWI | 2779 | 10 | | |
| 100 | 20 | ENV | 382 | FFCLWVYI | 2780 | 8 | | |
| 80 | 16 | ENV | 182 | FFLLTRIL | 2781 | 8 | | |
| 80 | 16 | ENV | 182 | FFLLTRILTI | 2782 | 10 | | |
| 85 | 17 | ENV | 13 | FFPDHQLDPAF | 2783 | 11 | | |
| 80 | 16 | ENV | 181 | GFFLLTRI | 2784 | 8 | | |
| 80 | 16 | ENV | 181 | GFFLLTRIL | 2785 | 9 | | |
| 80 | 16 | ENV | 181 | GFFLLTRILTI | 2786 | 11 | | |
| 95 | 19 | ENV | 12 | GFFPDHQL | 2787 | 8 | | |
| 75 | 15 | ENV | 170 | GFLGPLLVL | 2788 | 9 | | |
| 80 | 16 | POL | 500 | GFRKIPMGVGL | 2789 | 11 | | |
| 85 | 17 | NUC | 29 | GMDIDPYKEF | 2790 | 10 | | |
| 90 | 18 | ENV | 265 | GMLPVCPL | 2791 | 8 | | |
| 85 | 17 | NUC | 25 | GWLWGMDI | 2792 | 8 | | |
| 85 | 17 | ENV | 65 | GWSPQAQGI | 2793 | 9 | | 0.0024 |
| 85 | 17 | ENV | 65 | GWSPQAQGIL | 2794 | 10 | | 0.0003 |
| 95 | 19 | POL | 639 | GYPALMPL | 2795 | 8 | | |
| 95 | 19 | ENV | 234 | GYRWMCLRRF | 2796 | 10 | — | 0.0007 |
| 95 | 19 | ENV | 234 | GYRWMCLRRFI | 2797 | 11 | | |
| 75 | 15 | POL | 579 | GYSLNFMGYVI | 2798 | 11 | | |
| 80 | 16 | POL | 820 | HFASPLHVAW | 2799 | 10 | | |
| 75 | 15 | POL | 7 | HFRKLLL | 2800 | 8 | | |
| 100 | 20 | POL | 146 | HYLHTLWKAGI | 2801 | 11 | | |
| 100 | 20 | ENV | 381 | IFFCLWVYI | 2802 | 9 | | 0.0087 |
| 80 | 16 | ENV | 245 | IFLFILLL | 2803 | 8 | | |
| 80 | 16 | ENV | 245 | IFLFILLLCL | 2804 | 10 | | |
| 80 | 16 | ENV | 245 | IFLFILLLCLI | 2805 | 11 | | |
| 85 | 17 | ENV | 358 | IWMMWYWGPSL | 2806 | 11 | | 0.0004 |
| 95 | 19 | POL | 395 | KFAVPNLQSL | 2807 | 10 | | 0.0020 |
| 100 | 20 | POL | 121 | KYLPLDKGI | 2808 | 9 | | |
| 85 | 17 | POL | 745 | KYTSFPWL | 2809 | 8 | | |
| 85 | 17 | POL | 745 | KYTSFPWLL | 2810 | 8 | — | 5.3000 |
| 80 | 16 | ENV | 247 | LFILLLCL | 2811 | 8 | | |
| 80 | 16 | ENV | 247 | LFILLLCLI | 2812 | 9 | | |
| 80 | 16 | ENV | 247 | LFILLLCLIF | 2813 | 10 | | |
| 80 | 16 | ENV | 247 LFILLLCLIFL | 2814 | 11 | | | |
| 95 | 19 | POL | 643 | LMPLYACI | 2815 | 8 | | |
| 90 | 18 | NUC | 101 | LWFHISCL | 2816 | 8 | | |
| 85 | 17 | NUC | 101 | LWFHISCLTF | 2817 | 10 | | |
| 80 | 16 | POL | 492 | LYSHPIIL | 2818 | 8 | | |
| 80 | 16 | POL | 492 | LYSHPIILGF | 2819 | 10 | — | 1.1000 |
| 85 | 17 | ENV | 360 | MMWYWGPSL | 2820 | 9 | — | 0.0060 |
| 85 | 17 | ENV | 361 | MWYWGPSL | 2821 | 8 | | 0.0005 |
| 95 | 19 | POL | 561 | NFLLSLGI | 2822 | 8 | | |
| 95 | 19 | POL | 561 | NFLLSLGIHL | 2823 | 10 | | 0.0099 |
| 80 | 16 | POL | 758 | NWILRGTSF | 2824 | 9 | | |
| 95 | 19 | POL | 512 | PFLLAQFTSAI | 2825 | 11 | | |
| 95 | 19 | POL | 634 | PFTQCGYPAL | 2826 | 10 | | 0.0002 |
| 95 | 19 | ENV | 341 | PFVQWFVGL | 2827 | 9 | | 0.0003 |
| 80 | 16 | POL | 505 | PMGVGLSPF | 2828 | 9 | | |
| 80 | 16 | POL | 505 | PMGVGLSPFL | 2829 | 10 | | |
| 80 | 16 | POL | 505 | PMGVGLSPFLL | 2830 | 11 | | |
| 80 | 16 | POL | 750 | PWLLGCAANW | 2831 | 10 | | |
| 80 | 16 | POL | 750 | PWLLGCAANWI | 2832 | 11 | | |
| 100 | 20 | POL | 51 | PWTHKVGNF | 2833 | 9 | — | 0.0290 |
| 95 | 19 | ENV | 344 | QWFVGLSPTVW | 2834 | 11 | | |
| 75 | 15 | ENV | 242 | RFIIFLFI | 2835 | 8 | | |
| 75 | 15 | ENV | 242 | RFIIFLFIL | 2836 | 9 | | |
| 75 | 15 | ENV | 242 | RFIIFLFILL | 2837 | 10 | | |
| 75 | 15 | ENV | 242 | RFIIFIFILLL | 2838 | 11 | | |
| 100 | 20 | ENV | 332 | RFSWLSLL | 2839 | 8 | | |
| 100 | 20 | ENV | 332 | RFSWLSLLVPF | 2840 | 11 | | |
| 85 | 17 | POL | 577 | RWGYSLNF | 2841 | 8 | | |
| 95 | 19 | ENV | 236 | RWMCLRRF | 2842 | 8 | | |
| 95 | 19 | ENV | 236 | RWMCLRRFI | 2843 | 9 | — | 0.0710 |
| 95 | 19 | ENV | 236 | RWMCLRRFII | 2844 | 10 | — | 1.1000 |
| 95 | 19 | ENV | 236 | RWMCLRRFIIF | 2845 | 11 | | |
| 100 | 20 | POL | 167 | SFCGSPYSW | 2846 | 9 | — | 0.0710 |
| 95 | 19 | NUC | 46 | SFLPSDFF | 2847 | 8 | | |
| 80 | 16 | POL | 765 | SFVYVPSAL | 2848 | 9 | | |
| 95 | 19 | POL | 413 SWLSLDVSAAF | 2849 | 11 | | | |
| 100 | 20 | ENV | 334 | SWLSLLVPF | 2850 | 9 | — | 0.3900 |
| 95 | 19 | POL | 392 | SWPKFAVPNL | 2851 | 10 | — | 5.6000 |
| 100 | 20 | ENV | 197 | SWWTSLNF | 2852 | 8 | | |
| 95 | 19 | ENV | 197 | SWWTSLNFL | 2853 | 9 | — | 0.3800 |
| 90 | 18 | POL | 537 | SYMDDVVL | 2854 | 8 | | |
| 75 | 15 | POL | 4 | SYQHFRKL | 2855 | 8 | | |
| 75 | 15 | POL | 4 | SYQHFRKLL | 2856 | 9 | | 0.0051 |
| 75 | 15 | POL | 4 | SYQHFRKLLL | 2857 | 10 | — | 0.0660 |
| 75 | 15 | POL | 4 | SYQHFRKLLLL | 2858 | 11 | | |
| 75 | 15 | NUC | 138 | TFGRETVL | 2859 | 8 | | |
| 75 | 15 | NUC | 138 | TFGRETVLEYL | 2860 | 11 | | |
| 95 | 19 | POL | 857 | TFSPTYKAF | 2861 | 9 | | 0.0060 |
| 95 | 19 | POL | 657 | TFSPTYKAFL | 2862 | 10 | | 0.0043 |
| 95 | 19 | POL | 686 | VFADATPTGW | 2863 | 10 | — | 0.0180 |
| 75 | 15 | X | 131 | VFVLGGCRHKL | 2864 | 11 | | |
| 90 | 18 | NUC | 102 | WFHISCLTF | 2865 | 9 | — | 0.0300 |
| 95 | 19 | ENV | 345 | WFVGLSPTVW | 2866 | 10 | — | 0.0120 |
| 95 | 19 | ENV | 345 | WFVGLSPTVWL | 2867 | 11 | | |
| 95 | 19 | ENV | 237 | WMCLRRFI | 2868 | 8 | | |
| 95 | 19 | ENV | 237 | WMCLRRFII | 2869 | 9 | — | |
| 95 | 19 | RNV | 237 | WMCLRRFIIF | 2870 | 10 | | 0.0013 |
| 95 | 19 | ENV | 237 | WMCLRRFIIFL | 2871 | 11 | | |
| 85 | 17 | ENV | 359 | WMMWYWGPSL | 2872 | 10 | — | |
| 95 | 19 | ENV | 198 | WWTSLNFL | 2873 | 8 | | |

[0434] TABLE XIXa

| HBV DR-SUPER MOTIF | | | | | | | | | |
|---|---|---|---|---|---|---|---|---|---|
| | Core SEQ | Core | | Core | Exemplary | Exemplary | Position in HBV | Exemplary Sequence | Exemplary Sequence |
| Protein | ID NO: | Sequence | Core Freq. | Conservancy (%) | SEQ ID NO: | Sequence | Poly-Protein | Frequency | Conservancy (%) |
| POL | 2874 | FAAPFTQCG | 19 | 95 | 3021 | LLGFAAPFTQCGYPA | 628 | 19 | 95 |
| POL | 2875 | FADATPTGW | 19 | 95 | 3022 | CQVFADATPTGWGLA | 684 | 16 | 80 |
| POL | 2876 | FAVPNLQSL | 19 | 95 | 3023 | WPKFAVPNLQSLTNL | 393 | 19 | 95 |
| NUC | 2877 | FGRETVLEY | 15 | 75 | 3024 | CLTFGRETVLEYLVS | 136 | 14 | 70 |
| POL | 2876 | FGVEPSSGS | 15 | 75 | 3025 | RRSFGVEPSGSGHID | 252 | 6 | 30 |
| NUC | 2879 | FHISCLTFG | 18 | 90 | 3026 | LLWFHISCLTFGRET | 100 | 17 | 85 |
| NUC | 2880 | FHLCLIISC | 16 | 80 | 3027 | MQLFHLCLIISCSCP | 1 | 10 | 50 |
| ENV | 2881 | FILLLCLIF | 16 | 80 | 3028 | IFLFILLLCLIFLLV | 245 | 18 | 80 |
| ENV | 2882 | FLFILLLCL | 16 | 80 | 3029 | FIIFLFILLLCLIFL | 243 | 16 | 80 |
| ENV | 2883 | FLGPLLVLQ | 15 | 75 | 3030 | TSGFLGPLLVLQAGF | 168 | 15 | 75 |
| ENV | 2884 | FLLTRILTI | 16 | 80 | 3031 | AGFFLLTRILTIPQS | 180 | 16 | 80 |
| ENV | 2885 | FLLVLLDYQ | 19 | 95 | 3032 | CLIFLLVLLDYQGML | 253 | 19 | 95 |
| ENV | 2886 | FPAGGSSSG | 15 | 75 | 3033 | GLYFPAGGSSSGTVN | 127 | 11 | 55 |
| ENV | 2887 | FPDHQLDPA | 18 | 90 | 3034 | LGFFPDHQLDPAFGA | 22 | 9 | 45 |
| POL | 2888 | FPHCLAFSY | 19 | 95 | 3035 | RRAFPHCLAFSYMDD | 527 | 19 | 95 |
| POL | 2889 | FRKIPMGVG | 16 | 80 | 3036 | ILGFRKIPMGVGLSP | 498 | 13 | 65 |
| POL | 2890 | FRKLPVNRP | 16 | 80 | 3037 | KQCFRKLPVNRPIDW | 616 | 9 | 45 |
| X | 2891 | FSSAGPCAL | 19 | 95 | 3038 | VCAFSSAGPCALRFT | 60 | 18 | 90 |
| ENV | 2892 | FSWLSLLVP | 20 | 100 | 3039 | SVRFSWLSLLVPFVQ | 330 | 16 | 80 |
| POL | 2893 | FTFSPTYKA | 19 | 95 | 3040 | KQAFTFSPTYKAFLC | 653 | 12 | 60 |
| POL | 2894 | FTGLYSSTV | 18 | 90 | 3041 | VGNFTGLYSSTVPVF | 56 | 11 | 55 |
| POL | 2895 | FTSAICSVV | 19 | 95 | 3042 | LAQFTSAICSVVRRA | 515 | 19 | 95 |
| ENV | 2896 | FVGLSPTVW | 19 | 95 | 3043 | VQWFVGLSPTVWLSV | 343 | 14 | 70 |
| X | 2897 | FVLGGCRHK | 18 | 90 | 3044 | LKVFVLGGCRHKLVC | 129 | 14 | 70 |
| ENV | 2898 | FVQWFVGLS | 19 | 95 | 3045 | LVPFVQWFVGLSPTV | 339 | 19 | 95 |
| POL | 2899 | FVYVPSALN | 18 | 90 | 3046 | GTSFVYVPSALNPAD | 763 | 16 | 80 |
| POL | 2900 | IDWKVCQRI | 17 | 85 | 3047 | NRPIDWKVCQRIVGL | 614 | 16 | 80 |
| ENV | 2901 | IFLFILLLC | 16 | 80 | 3048 | RFIIFLFILLLCLIF | 242 | 15 | 75 |
| ENV | 2902 | IFLLVLLDY | 19 | 95 | 3049 | LCLIFLLVLLDYQGM | 252 | 19 | 95 |
| POL | 2903 | IGTDNSVVL | 16 | 80 | 3050 | AKLIGTDNSVVLSRK | 731 | 13 | 65 |
| POL | 2904 | IHTAELLAA | 17 | 85 | 3051 | PLPIHTAELLAACFA | 711 | 16 | 80 |
| ENV | 2905 | IIFIFILLI | 16 | 80 | 3052 | RRFIIFLFILLLCLI | 241 | 15 | 75 |
| ENV | 2906 | ILLLCLIFL | 20 | 100 | 3053 | FLFILLLCLIFLLVL | 246 | 16 | 80 |
| POL | 2907 | ILRGTSFVY | 16 | 80 | 3054 | ANWILRGTSFVYVPS | 757 | 16 | 80 |
| NUC | 2908 | ILSTLPETT | 20 | 100 | 3055 | NAPILSTLPETTVVR | 165 | 19 | 95 |
| ENV | 2909 | IPIPSSWAF | 20 | 100 | 3056 | CTCIPIPSSWAFARF | 321 | 8 | 40 |
| NUC | 2910 | IRTPPAYRP | 19 | 95 | 3057 | GVWIRTPPAYRPPNA | 123 | 19 | 95 |
| POL | 2911 | LAACFARSR | 17 | 85 | 3058 | AELLAACFARSRSGA | 717 | 16 | 80 |
| POL | 2912 | LAFSYMDDV | 18 | 90 | 3059 | PHCLAFSYMDDVVLG | 531 | 18 | 90 |
| POL | 2913 | LAQFTSAIC | 19 | 95 | 3060 | PFLLAQFTSAICSVV | 512 | 19 | 95 |
| NUC | 2914 | LCLGWLWGM | 17 | 85 | 3061 | ASKLCLGWLWGMDID | 19 | 17 | 85 |
| ENV | 2915 | LCLIFLLVL | 20 | 100 | 3062 | ILLLCLIFLLVLLDY | 249 | 19 | 95 |
| X | 2916 | LCLRPVGAE | 19 | 95 | 3063 | RDVLCLRPVGAESRG | 13 | 18 | 90 |
| POL | 2917 | LCQVFADAT | 19 | 95 | 3064 | RPGLCQVFADATPTG | 680 | 11 | 55 |
| ENV | 2918 | LDSWWTSLN | 19 | 95 | 3065 | PQSLDSWWTSLNFLG | 192 | 17 | 85 |
| NUC | 2919 | LDTASALYR | 17 | 85 | 3086 | RDLLDTASALYREAL | 28 | 18 | 80 |
| POL | 2920 | LDVSAAFYH | 19 | 95 | 3067 | WLSLDVSAAFYHIPL | 425 | 11 | 55 |
| ENV | 2921 | LDYQGMLPV | 18 | 90 | 3088 | LVLLDYQGMLPVCPL | 258 | 18 | 90 |
| POL | 2922 | LEEELPRLA | 18 | 90 | 3069 | AGPLEEELPRLADEG | 18 | 13 | 65 |
| ENV | 2923 | LFILLLCLI | 16 | 80 | 3070 | IIFLFILLLCLIFLL | 244 | 16 | 80 |
| POL | 2924 | LGAKSVQHL | 17 | 95 | 3071 | DVVLGAKSVQHLESL | 541 | 16 | 80 |
| POL | 2925 | LGFAAPPTQ | 19 | 95 | 3072 | VGLLGFAAPFTQCGY | 626 | 19 | 95 |
| POL | 2926 | LGFRKIPMG | 19 | 95 | 3073 | PIILGFRKIPMGVGL | 496 | 13 | 85 |
| POL | 2927 | LGNLNVSIP | 19 | 95 | 3074 | DLNLGNLNVSIPWTH | 40 | 19 | 95 |
| ENV | 2928 | LGPLLVLQA | 19 | 95 | 3075 | SGFLGPLLVLQAGFF | 169 | 15 | 75 |
| POL | 2929 | LHPAAMPHL | 20 | 100 | 3076 | HLPLHPAAMPHLLVG | 425 | 9 | 45 |
| ENV | 2930 | LIFLLVLLD | 19 | 95 | 3077 | LLCIFLLVLLDYQG | 251 | 19 | 95 |
| POL | 2931 | LKLIMPARF | 15 | 75 | 3078 | KRRLKLIMPARFYPN | 104 | 7 | 35 |
| X | 2932 | LKVFVLGGC | 15 | 75 | 3079 | EIRLKVFVLGGCRHK | 126 | 13 | 65 |
| POL | 2933 | LLAQFTSAI | 19 | 95 | 3080 | SPFLLAQFTSAICSV | 511 | 19 | 95 |
| NUC | 2934 | LLDTASALY | 17 | 85 | 3081 | IRDLLDTASALYREA | 56 | 9 | 45 |
| POL | 2935 | LLGCAANWI | 18 | 80 | 3082 | FPWLLGCAANWILRG | 749 | 15 | 75 |
| POL | 2936 | LLGFAAPFT | 19 | 95 | 3083 | IVGLLGFAAPFTQCG | 625 | 18 | 90 |
| ENV | 2937 | LLGWSPQAQ | 17 | 85 | 3084 | HGGLLGWSPQAQGIL | 60 | 15 | 75 |
| ENV | 2938 | LLLCLIFLL | 20 | 100 | 3085 | LFILLLCLIFLLVLL | 247 | 16 | 80 |
| NUC | 2939 | LLSFPSDF | 19 | 95 | 3086 | SVELLSFLPSDFFPS | 41 | 11 | 55 |
| POL | 2940 | LLSLGIHLN | 19 | 95 | 3087 | TNFLLSLGIHLNPNK | 560 | 15 | 75 |
| POL | 2941 | LLSSNLSWL | 18 | 90 | 3088 | LTNLLSSNLSWLSLD | 404 | 18 | 90 |
| ENV | 2942 | LLTRILTIP | 16 | 80 | 3089 | GFFLLTRILTIPQSL | 181 | 16 | 80 |
| ENV | 2943 | LLVLQAGFF | 19 | 95 | 3090 | LGPLLVLQAGFFLLT | 172 | 18 | 90 |
| ENV | 2944 | LLVPFVQWF | 20 | 100 | 3091 | WLSLLVPFVQWFVGL | 335 | 19 | 95 |
| NUC | 2945 | LLWFHISCL | 18 | 90 | 3092 | IRQLLWFHISCLTFG | 126 | 13 | 85 |
| POL | 2946 | LMPLYACIQ | 19 | 95 | 3093 | YPALMPLYACIQSKQ | 640 | 11 | 55 |
| POL | 2947 | LNLGNLNVS | 19 | 95 | 3094 | AEDLNLGNLNVSIPW | 38 | 19 | 95 |
| POL | 2948 | LNPNKTKRW | 15 | 75 | 3095 | GIHLNPNKTKRWGYS | 567 | 15 | 75 |
| POL | 2949 | LNRRVAEDL | 17 | 85 | 3096 | DEGLNRRVAEDLNLG | 30 | 12 | 60 |
| POL | 2950 | LNVSIPWTH | 19 | 95 | 3097 | LGNLNVSPWTHKVG | 43 | 19 | 95 |
| NUC | 2951 | LPETTVVRR | 19 | 95 | 3098 | LSTLPETTVVRRRGR | 169 | 16 | 80 |
| ENV | 2952 | LPIFFCLWV | 20 | 100 | 3099 | LPLLPIFFCLWVYIZ | 376 | 13 | 65 |
| POL | 2953 | LPIHTAELL | 17 | 85 | 3100 | VAPLPIHTAELLAAC | 709 | 9 | 45 |
| POL | 2954 | LPVNRPIDW | 16 | 80 | 3101 | FRKLPVNRPIDWKVC | 608 | 15 | 75 |
| POL | 2955 | LQFRNSKPC | 18 | 90 | 3102 | CWWLQFRNSKPCSDY | 312 | 10 | 50 |
| X | 2956 | LRGLPVCAF | 19 | 95 | 3103 | HLSLRGLPVCAFSSA | 52 | 18 | 90 |
| X | 2957 | LRPVGAESR | 18 | 90 | 3104 | VLCLRPVGAESRGRP | 15 | 18 | 90 |
| NUC | 2958 | LRQAILCWG | 18 | 90 | 3105 | HTALRQAILCWGELM | 52 | 18 | 90 |
| ENV | 2959 | LRRFIIFLF | 15 | 75 | 3106 | WMCLRRFIIFLFILL | 237 | 15 | 75 |
| NUC | 2960 | LSFLPSDFF | 19 | 95 | 3107 | VELLSFLPSDFFPSI | 42 | 10 | 50 |
| POL | 2961 | LSLDVSAAF | 19 | 95 | 3108 | LSWLSLDVSAAFYHI | 423 | 11 | 55 |
| ENV | 2962 | LSLLVPFVQ | 20 | 100 | 3109 | FSWLSLLVPPVQWFV | 333 | 19 | 95 |
| X | 2963 | LSLRGLPVC | 19 | 3110 | GAHLSLRGLPVCAFS | 50 | 18 | 90 | |
| POL | 2964 | LSPFLLAQF | 19 | 95 | 3111 | GVGLSPFLLAQFTSA | 507 | 18 | 80 |
| POL | 2965 | LSRKYTSFP | 17 | 85 | 3112 | SVVLSRKYTSFPWLL | 739 | 17 | 85 |
| POL | 2966 | LSSNLSWLS | 18 | 90 | 3113 | TNLLSSNLSWLSLDV | 405 | 18 | 90 |
| ENV | 2967 | LSVPNPLGF | 15 | 75 | 3114 | GTNLSVPNPLGFFPD | 13 | 14 | 70 |
| POL | 2968 | LSWLSLDVS | 20 | 100 | 3115 | SSNLSWLSLDVSAAF | 409 | 17 | 85 |
| ENV | 2969 | LTIPQSLDS | 18 | 90 | 3116 | TRILTIPQSLDSWWT | 186 | 15 | 75 |
| POL | 2970 | LTNLLSSNL | 18 | 90 | 3117 | LQSLTNLLSSNLSWL | 401 | 18 | 90 |
| ENV | 2971 | LTRILTIPQ | 16 | 80 | 3118 | FFLLTRILTIPQSLD | 182 | 15 | 75 |
| POL | 2972 | LVDKNPHNT | 20 | 100 | 3119 | GVFLVDKNPHNTTES | 372 | 11 | 55 |
| NUC | 2973 | LVSFGVWIR | 18 | 90 | 3120 | LEYLVSFGVWIRTPP | 145 | 14 | 70 |
| POL | 2974 | LVVDSQFS | 20 | 100 | 3121 | ESRLVVDFSQFSRGN | 374 | 45 | |
| NUC | 2975 | LWFHISCLT | 17 | 85 | 3122 | RQLLWFHISCLTFGR | 98 | 17 | 85 |
| NUC | 2976 | LWGMDIDPY | 17 | 85 | 3123 | LGWLWGMDIDPYKEF | 24 | 17 | 85 |
| POL | 2977 | LWKAGILYK | 20 | 100 | 3124 | LHTLWKAGILYKRET | 148 | 18 | 90 |
| NUC | 2978 | LYREALESP | 17 | 85 | 3125 | ASALYREALESPEHC | 34 | 17 | 85 |
| POL | 2979 | LYSHPIILG | 16 | 80 | 3126 | KLHLYSHPIILGFRK | 489 | 16 | 80 |
| POL | 2980 | MDDVVLGAK | 18 | 90 | 3127 | FSYMDDVVLGAKSVQ | 536 | 18 | 90 |
| POL | 2981 | MGVGLSPFL | 18 | 80 | 3128 | KIPMGVGLSPFLLAQ | 503 | 16 | 80 |
| POL | 2982 | MPHLLVGSS | 17 | 85 | 3129 | PAAMPHLLVGSSGLS | 430 | 8 | 40 |
| ENV | 2983 | MQWNSTTFH | 16 | 80 | 3130 | PQAMQWNSTTFHQTL | 106 | 8 | 40 |
| X | 2984 | MSTTDLEAY | 15 | 75 | 3131 | LSAMSTTDLEAYFKD | 100 | 9 | 45 |
| ENV | 2985 | MWYWGPSLY | 17 | 85 | 3132 | IWMMWYWGPSLYNIL | 389 | 9 | 45 |
| X | 2986 | VCAFSSAGP | 19 | 95 | 3133 | GLPVCAFSSAGPCAL | 57 | 18 | 90 |
| POL | 2987 | VCQRIVGLL | 17 | 85 | 3134 | DWKVCQRIVGLLGFA | 618 | 17 | 85 |
| POL | 2988 | VFADATPTG | 19 | 95 | 3135 | LCQVFADATPTGWGL | 683 | 19 | 95 |
| ENV | 2989 | VGLSPTVWL | 19 | 95 | 3136 | QWFVGLSPTVWLSVI | 344 | 14 | 70 |
| POL | 2990 | VGPLTVNEK | 17 | 85 | 3137 | QQYVGPLTVNEKRRL | 93 | 8 | 40 |
| POL | 2991 | VHFASPLHV | 16 | 80 | 3138 | PDRVHFASPLHVAWR | 816 | 12 | 60 |
| X | 2992 | VLCLRPVGA | 19 | 95 | 3139 | ARDVLCLRPVGAESR | 12 | 14 | 70 |
| POL | 2993 | VLGAKSVQH | 19 | 95 | 3140 | DDVVLGAKSVQHLES | 540 | 16 | 80 |
| X | 2994 | VLHKRTLGL | 17 | 85 | 3141 | LPKVLHKRTLGLSAM | 89 | 11 | 55 |
| POL | 2995 | VPNLQSLTN | 19 | 95 | 3142 | KFAVPNLQSLTNLLS | 395 | 19 | 95 |
| NUC | 2996 | VQASKICLG | 16 | 80 | 3143 | CPTVQASKLCLGWLW | 14 | 15 | 75 |
| ENV | 2997 | VRFSWLSLL | 16 | 80 | 3144 | WASVRFSWLSLLVPF | 328 | 13 | 65 |
| POL | 2998 | VRRAFPHCL | 19 | 95 | 3145 | CSVVRRAFPHCLAFS | 523 | 19 | 95 |
| POL | 2999 | VSIPWTHKV | 20 | 100 | 3146 | NLNVSIPWTHKVGNF | 45 | 19 | 95 |
| NUC | 3000 | VWIATPPAY | 19 | 95 | 3147 | SFGVWIRTPPAYRPP | 121 | 18 | 90 |
| POL | 3001 | VYVPSALNP | 18 | 90 | 3148 | TSFVYVPSALNPADD | 764 | 18 | 80 |
| NUC | 3002 | WFHISCLTF | 18 | 90 | 3149 | QLLWFHISCLTFGRE | 99 | 17 | 85 |
| ENV | 3003 | WFVGLSPTV | 19 | 95 | 3150 | FVQWFVGLSPTVWLS | 342 | 19 | 95 |
| POL | 3004 | WILRGTSFV | 16 | 80 | 3151 | AANWILRGTSFVYVP | 756 | 14 | 70 |
| NUC | 3005 | WIRTPPAYR | 19 | 95 | 3152 | FGVWIRTPPAYRPPN | 122 | 19 | 95 |
| POL | 3006 | WKAGILYKR | 20 | 100 | 3153 | HTLWKAGILYKRETT | 149 | 18 | 90 |
| POL | 3007 | WLLGCAANW | 16 | 80 | 3154 | SFPWLLGCAANWILR | 748 | 15 | 75 |
| POL | 3008 | WLSLDVSAA | 19 | 95 | 3155 | NLSWLSLDVSAAFYH | 411 | 17 | 85 |
| ENV | 3009 | WLSLLVPFV | 20 | 100 | 3156 | RFSWLSLLVPFVQWF | 332 | 20 | 100 |
| POL | 3010 | WPKFAVPNL | 19 | 95 | 3157 | RVSWPKFAVPNLQSL | 390 | 11 | 55 |
| POL | 3011 | YMDDVVLGA | 18 | 90 | 3158 | AFSYMDDVVLGAKSV | 535 | 18 | 90 |
| POL | 3012 | YPALMPLYA | 19 | 95 | 3159 | QCGYPALMPLYACIQ | 637 | 19 | 95 |
| ENV | 3013 | YQGMLPVCP | 18 | 3160 | LLDYQGMILPVCPLIP | 260 | 10 | 50 | |
| NUC | 3014 | YRPPNAPIL | 20 | 100 | 3161 | PPAYRPPNAPILSTL | 129 | 19 | 95 |
| ENV | 3015 | YRWMCLRRF | 19 | 95 | 3162 | CPGYRWMCLRRFIIF | 232 | 19 | 95 |
| POL | 3016 | YSHPIILGF | 16 | 80 | 3163 | LHLYSHPIILGFRKI | 490 | 16 | 80 |
| POL | 3017 | YSLNFMGYV | 15 | 75 | 3164 | RWGYSLNFMGYVIGS | 588 | 11 | 55 |
| POL | 3018 | YVPSALNPA | 18 | 90 | 3165 | SFVYVPSALNPADDP | 765 | 16 | 80 |
| ENV | 3019 | FFCLWVYIZ | 20 | | | | 382 | | |
| ENV | 3020 | MGTNLSVPN | 15 | | | | 12 | | |

[0435] TABLE XIXB

| HBV DR-SUPER MOTIF With Binding Data | | | | | | | | | | | | | | | | |
|---|---|---|---|---|---|---|---|---|---|---|---|---|---|---|---|---|
| Core | | | | | | | | | | | | | | | | |
| SEQ ID | | SEQ ID | | | | | | | | | | | | | | |
| NO: | Core Sequence | NO: | Exemplary Sequence | DR1 | DR2wβ1 DR2wβ2 | DR3 | DR4w4 | DR4w15 | DR5w11 | DR5w12 | DR6w19 | DR7 | DR8W2 | DR9 | Drw53 | |
| 2874 | FAAPFTQCG | 3021 | LLGFAAPFTQCGYPA | | | | | | | | | | | | | |
| 2875 | FADATPTGW | 3022 | CQVFADATPTGWGLA | | | | | | 0.2800 | | | | | | | |
| 2876 | FAVPNLQSL | 3023 | WPKFAVPNLQSLTNL | 0.0007 | | 0.0013 | | 0.0023 | | 0.0002 | | | 0.0008 | | | 0.0180 |
| 2877 | FGRETVLEY | 3024 | CLTFGRETVLEYLVS | | | | | | | | | | | | | |
| 2878 | FGVEPSGSG | 3025 | RRSFGVEPSGSGHID | | | | | | | | | | | | | |
| 2879 | FHISCLTFG | 3026 | LLWFHISCLTFGRET | | | | | | | | | | | | | |
| 2880 | FHLCLIISC | 3027 | MQLFHLCLIISCSCP | | | | | | | | | | | | | |
| 2881 | FILILCLIF | 3028 | IFLFILLLCLIFLLV | 0.0005 | | | | 0.0041 | | | | | 0.0018 | | | |
| 2882 | FLFILLLCL | 3029 | FIIFLFILLLCLIFL | | | | | | | | | | | | | |
| 2883 | FLGPLLVLQ | 3030 | TSGFLGPLLVLQAGF | | | | | | | | | | | | | |
| 2884 | FLLTRILTI | 3031 | AGFFLLTRILTIPQS | 4.6000 | 0.0420 | 0.0190 | 0.0040 | 5.3000 | 0.1500 | 3.6000 | 0.0700 | 0.3700 | 3.1000 | 0.2600 | 1.3000 | |
| 2885 | FLLVLLDYQ | 3032 | CLIFLLVLLDYQGML | | | | | | | | | | | | | |
| 2888 | FPAGGSSSG | 3033 | GLYFPAGGSSSGTVN | | | | | | | | | | | | | |
| 2887 | FPDHQLDPA | 3034 | LGFFPDHQLDPAFGA | | | | | | | | | | | | | |
| 2888 | FPHCLAFSY | 3035 | RRAFPHCLAFSYMDD | 0.0010 | | 0.0010 | | −0.0009 | | 0.0010 | | | 0.0017 | | | |
| 2889 | FRKIPMGVG | 3036 | ILGFRKIPMGVGLSP | | | | | | | | | | | | | |
| 2890 | FRKLPVNRP | 3037 | KQCFRKLPVNRPIDW | 1.5000 | 0.0022 | 0.0210 | −0.0006 | 1.2000 | 0.8500 | 0.0130 | 0.0013 | 0.0043 | 0.4000 | 0.0580 | 0.0250 | |
| 2891 | FSSAGPCAL | 3038 | VCAFSSAGPCALRFT | 0.2100 | | 0.2600 | | 0.0023 | | 0.0003 | | | 0.0200 | | | 0.0150 |
| 2892 | FSWLSLLVP | 3039 | SVRFSWLSLLVPFVQ | 0.9000 | | | | 0.0099 | | | | | 0.0037 | | | |
| 2893 | FTFSPTYKA | 3040 | KQAFTFSPTYKAFLC | 0.5300 | 0.2400 | 0.1400 | 0.0090 | 1.1000 | 0.2200 | 0.2400 | 0.0024 | 0.0200 | 0.3300 | 0.1200 | 0.5400 | |
| 2894 | FTGLYSSTV | 3041 | VGNFTGLYSSTVPVF | 1.7000 | 0.0100 | 0.0016 | | 0.0140 | 0.1700 | 0.0035 | | 0.0580 | 0.5800 | 0.0044 | 0.3100 | |
| 2895 | FTSAICSVV | 3042 | LAQFTSAICSVVRRA | 0.0120 | 0.0065 | 0.1500 | −0.0009 | 0.0150 | 0.0280 | 0.0076 | 0.0091 | 0.0010 | 0.0280 | 0.0150 | 0.0880 | 0.0190 |
| 2896 | FVGLSPTVW | 3043 | VQWFVGLSPTVWLSV | | | | | | | | | | | | | |
| 2897 | FVLGGCRHK | 3044 | LKVFVLGGCRHKLVC | | | | | | | | | | | | | |
| 2898 | FVQWFVGLS | 3045 | LVPFVQWFVGLSPTV | 0.0130 | 0.6900 | 0.0140 | −0.0013 | 0.1500 | 1.4000 | 0.3800 | 0.66000.0018 | 0.0092 | 0.6600 | 2.5000 | 2.6000 | |
| 2899 | FVYVPSALN | 3046 | GTSFVYVPSALNPAD | 0.3500 | 0.0140 | 0.0500 | −0.0008 | 0.3800 | 0.4100 | 0.0470 | −0.0001 | 0.0001 | 0.2700 | 0.0610 | 0.3400 | |
| 2900 | IDWKVCQRI | 3047 | NRPIDWKVCQRIVGL | | | | | | | | | | | | | |
| 2901 | IFLFILLLC | 3048 | RFIIFLFILLLCLIF | | | | | | | | | | | | | |
| 2902 | IFLLVLLDY | 3049 | LCLIFLLVLLDYQGM | 0.0016 | | 0.0060 | | 0.0230 | | 0.0017 | | | 0.0044 | | | |
| 2903 | IGTDNSVVL | 3050 | AKLIGTDNSVVLSRK | | | | | | | | | | | | | |
| 2904 | IHTAELLAA | 3051 | PLPIHTAELLAACFA | 0.0046 | | | | 0.0490 | | | | | −0.0003 | | | |
| 2905 | IIFLFILLL | 3052 | RRFIIFLFILLLCLI | | | | | | | | | | | | | |
| 2908 | ILLLCLIFL | 3053 | FLFILLLCLIFLLVL | | | | | | | | | | | | | |
| 2907 | ILRGTSFVY | 3054 | ANWILRGTSFVYVPS | | | | | | | | | | | | | |
| 2908 | ILSTLPETT | 3055 | NAPILSTLPETTVVR | 0.0009 | | 0.0009 | | −0.0007 | | −0.0002 | | | 0.0005 | | | 0.1600 |
| 2909 | IPIPSSWAF | 3056 | CTCIPIPSSWAFARF | | | | | | | | | | | | | |
| 2910 | IRTPPAYRP | 3057 | GVWIRTPPAYRPPNA | 0.3700 | 0.0420 | 7.2000 | 0.0120 | 3.4000 | 0.5700 | 0.4800 | 0.0140 | −0.0004 | 0.2200 | 0.5300 | 0.0450 | |
| 2911 | LAACFARSR | 3058 | AELLAACFARSRSGA | | | | | | | | | | | | | |
| 2912 | LAFSYMDDV | 3059 | PHCLAFSYMDDVVLG | | | | | | | | | | | | | |
| 2913 | LAQFTSAIC | 3060 | PFLLAQFTSAICSVV | 0.1800 | 0.0270 | 0.0042 | −0.0013 | 0.0800 | 0.1200 | 0.0120 | 0.0016 | 0.0800 | 0.0770 | 0.0580 | 0.0590 | |
| 2914 | LCLGWLWGM | 3061 | ASKLCLGWLWGMDID | 0.0002 | | −0.0005 | | 0.0017 | | −0.0002 | | | 0.0013 | | | 0.0010 |
| 2915 | LCLIFLLVL | 3062 | ILLLCLIFLLVLLDY | 0.0026 | | 0.0069 | | 0.0320 | | 0.0018 | | | 0.0047 | | | |
| 2916 | LCLRPVGAE | 3063 | RDVLCLRPVGAESRG | | | | | | | | | | | | | |
| 2917 | LCQVFADAT | 3064 | RPGLCQVFADATPTG | | | | | | | | | | | | | |
| 2918 | LDSWWTSLN | 3085 | PQSLDSWWTSLNFLG | | | | | | | | | | | | | |
| 2919 | LDTASALYR | 3066 | RDLLDTASALYREAL | 0.0001 | | | | 0.0092 | | | | | 0.0770 | | | |
| 2920 | LDVSAAFYH | 3087 | WLSLDVSAAFYHIPL | | | | | | | | | | | | | |
| 2921 | LDYQGMLPV | 3088 | LVLLDYQGMLPVCPL | 0.0034 | | | −0.0013 | | | | | 0.0011 | | | | |
| 2922 | LEEELPRLA | 3089 | AGPLEEELPRLADEG | | | | 0.0022 | | | | | | | | | |
| 2923 | LFILLLCLI | 3070 | IIFLFILLLCLIFLL | | | | | | | | | | | | | |
| 2924 | LGAKSVQHL | 3071 | DVVLGAKSVQHLESL | | | | | | | | | | | | | |
| 2925 | LGFAAPFTQ | 3072 | VGLLGFAAPFTQCGY | 0.0470 | 0.3100 | 0.0008 | | −0.0014 | | −0.0004 | | −0.0001 | 0.0014 | | 0.5700 | |
| 2926 | LGFRKIPMG | 3073 | PIILFRKIPMGVGL | | | | | | | | | | | | | |
| 2927 | LGNLNVSIP | 3074 | DLNLGNLNVSIPWTH | 0.0038 | | | | 0.0240 | | | | | 0.0010 | | | |
| 2928 | LGPLLVLQA | 3075 | SGFLGPLLVLQAGFF | | | | | | | | | | | | | |
| 2929 | LHPAAMPHL | 3076 | HLPLHPAAMPHLLVG | | | | | | | | | | | | | |
| 2930 | LIFLLVLLD | 3077 | LLCLIFLLVLLDYQG | | | | | | | | | | | | | |
| 2931 | LKLIMPARF | 3078 | KRRLKLIMPARFYPN | | | | | | | | | | | | | |
| 2932 | LKVFVLGGC | 3079 | EIRLKVFVLGGCRHK | | | | | | | | | | | | | |
| 2933 | LLAQFTSAI | 3080 | SPFLLAQFTSAICSV | 0.1200 | 0.0200 | 0.0085 | −0.0013 | 0.0740 | 0.0190 | −0.0002 | −0.0013 | 0.0540 | 0.0330 | 0.0014 | 0.0380 | 0.2000 |
| 2934 | LLDTASALY | 3081 | IRDLLDTASALYREA | | | | | | | | | | | | | |
| 2935 | LLGCAANWI | 3082 | FPWLLGCAANWILRG | | | | | | | | | | | | | |
| 2936 | LLGFAAPFT | 3083 | IVGLLGFAAPFTQCG | 0.0200 | | −0.0005 | | −0.0007 | | −0.0002 | | | 0.0009 | | | 0.0067 |
| 2937 | LLGWSPQAQ | 3084 | HGGLLGWSPQAQGIL | | | | | | | | | | | | | |
| 2938 | LLLCLIFLL | 3085 | LFILLLCLIFLLVLL | | | | | | | | | | | | | |
| 2939 | LLSFLPSDF | 3088 | SVELLSFLPSDFFPS | | | | | | | | | | | | | |
| 2940 | LLSLGIHLN | 3087 | TNFLLSLGIHLNPNK | 3.5000 | 0.0410 | 0.1200 | | 0.0220 | 0.0360 | 0.0053 | | 0.0160 | 0.2200 | 0.0032 | 0.3800 | |
| 2941 | LLSSNLSWL | 3088 | LTNLLSSNLSWLSLD | 0.0010 | | 0.0083 | | 0.0160 | | 0.0013 | | | 0.0019 | | | 0.0200 |
| 2942 | LLTRILTIP | 3089 | GFFLLTRILTIPQSL | 0.4300 | 0.0150 | 0.0110 | | 3.1000 | 0.4500 | 2.3000 | | 0.0780 | 3.5000 | 1.6000 | 0.5500 | |
| 2943 | LLVLQAGFF | 3090 | LGPLLVLQAGFFLLT | | | | | | | | | | | | | |
| 2944 | LLVPFVQWF | 3091 | WLSLLVPFVQWFVGL | | | | | | | | | | | | | |
| 2945 | LLWFHISCL | 3092 | IRQLLWFHISCLTFG | | | | | | | | | | | | | |
| 2946 | LMPLYACIQ | 3093 | YPALMPLYACIQSKQ 0.2400 | | | | 0.0014 | | | | | 0.0011 | | | | |
| 2947 | LNLGNLNVS | 3094 | AEDLNLGNLNVSIPW | 0.0001 | | −0.0005 | | −0.0007 | | −0.0002 | | | −0.0003 | | | 0.0170 |
| 2948 | LNPNKTKRW | 3095 | GHLNPNKTKRWGYS | | | | | | | | | | | | | |
| 2949 | LNRRVAEDL | 3098 | DEGLNRRVAEDLNLG | | | | | | | | | | | | | |
| 2950 | LNVSIPWTH | 3097 | LGNLNVSIPWTHKVG | | | | | | | | | | | | | |
| 2951 | LPETTVVRR | 3098 | LSTLPETTVVRRRGR | | | | | | | | | | | | | |
| 2952 | LPIFFCLWV | 3099 | LPLLPIFFCLWVYIZ | | | | | | | | | | | | | |
| 2953 | LPIHTAELL | 3100 | VAPLPIHTAELLAAC | | | | | | | | | | | | | |
| 2954 | LPVNRPIDW | 3101 | FRKLPVNRPIDWKVC | | | | | | | | | | | | | |
| 2955 | LQFRNSKPC | 3102 | CWWLQFRNSKPCSDY | | | | | | | | | | | | | |
| 2956 | LRGLPVCAF | 3103 | HLSLRGLPVCAFSSA | 1.3000 | | | | 0.0028 | | | | | 0.0130 | | | |
| 2957 | LRPVGAESR | 3104 | VLCLRPVGAESRGRP | | | | | | | | | | | | | |
| 2958 | LRDAILCWG | 3105 | HTALRQAILCWGELM | | | | | | | | | | | | | |
| 2959 | LRRFIIFLF | 3106 | WMCLRRFIIFLFILL | | | | | | | | | | | | | |
| 2960 | LSFLPSDFF | 3107 | VELLSFLPSDFFPSI | | | | | | | | | | | | | |
| 2961 | LSLDVSAAF | 3108 | LSWLSLDVSAAFYHI | | | | | | | | | | | | | |
| 2962 | LSLLVPFVQ | 3109 | FSWLSLLVPFVQWFV | | | | | | | | | | | | | |
| 2963 | LSLRGLPVC | 3110 | GAHLSLRGLPVCAFS | 0.7899 | | 0.0042 | −0.0041 | 0.0011 | | 0.0025 | | | 0.0077 | | | 0.0150 |
| 2964 | LSPFLLADF | 3111 | GVGLSPFLLAQFTSA | | | | | | | | | | | | | |
| 2965 | LSRKYTSFP | 3112 | SVVLSRKYTSFPWLL | 0.0005 | | 0.0057 | 0.2100 | −0.0016 | | 0.5300 | | | 0.0130 | | | |
| 2966 | LSSNLSWLS | 3113 | TNLLSSNLSWLSLDV | 0.0016 | | −0.0005 | | 0.1300 | | 0.0006 | | | 0.0019 | | | 0.0410 |
| 2967 | LSVPNPLGF | 3114 | GTTNLSVPNPLGFFPD | | | | | | | | | | | | | |
| 2968 | LSWLSLDVS | 3115 | SSNLSWLSLDVSAAF | 0.1400 | 0.0030 | −0.0005 | 1.5000 | 0.2700 | | 0.0046 | 0.0180 | 0.1000 | 0.0039 | 0.0480 | 0.0110 | 6.2000 |
| 2969 | LTIPQSLDS | 3116 | TRILTIPQSLDSWWT | | | | | | | | | | | | | |
| 2970 | LTNLLSSNL | 3117 | LQSLTNLLSSNLSWL | 2.5000 | 0.4400 | 0.0200 | −0.0013 | 4.8000 | 0.8100 | 0.0680 | 0.7500 | 0.0260 | 0.1500 | 0.0880 | 0.1100 | |
| 2971 | LTRILTIPQ | 3118 | FFLLTRILIPQSLD | | | | | | | | | | | | | |
| 2972 | LVDKNPHNT | 3119 | GVFLVDKNPHNTTES | | | | | | | | | | | | | |
| 2973 | LVSFGVWIR | 3120 | LEYLVSFGVWIRTPP | | | | | | | | | | | | | |
| 2974 | LVVDFSQFS | 3121 | ESRLVVDFSQFSRGN | 0.0007 | 0.0074 | −0.0010 | 2.6000 | | | −0.0004 | | 0.0040 | −0.0014 | 0.0029 | | |
| 2975 | LWFHISCLT | 3122 | RQLLWFHISCLTFGR | 0.0002 | | 0.0009 | | 0.0140 | | 0.0011 | | | 0.0061 | | | 0.0096 |
| 2976 | LWGMDIDPY | 3123 | LGWLWGMDIDPYKEF | 0.0004 | | 0.0006 | 0.02000.0280 | | −0.0002 | | | 0.0004 | | | 0.0430 | |
| 2977 | LWKAGILYK | 3124 | LHTLWKAGILYKRET | | | | | | | | | | | | | |
| 2978 | LYREALESP | 3125 | ASALYREALESPEHC | | | | | | | | | | | | | |
| 2979 | LYSHPIILG | 3126 | KLHLYSHPIILGFRK | | | | | | | | | | | | | |
| 2980 | MDDVVLGAK | 3127 | FSYMDDVVLGASVQ | | | | | | | | | | | | | |
| 2981 | MGVGLSPFL | 3128 | KIPMGVGLSPFLLAQ | | | | | | | | | | | | | |
| 2982 | MPHLLVGSS | 3129 | PAAMPHLLVGSSGLS | | | | | | | | | | | | | |
| 2983 | MQWNSTTFH | 3130 | PQAMQWNSTTFHQTL | 0.0012 | | | | 0.0300 | | | | | 0.1200 | | | |
| 2984 | MSTTDLEAY | 3131 | LSAMSTTDLEAYFKD | | | | | | | | | | | | | |
| 2985 | MWYWGPSLY | 3132 | IWMMWYWGPSLYNIL | | | | | | | | | | | | | |
| 2986 | VCAFSSAGP | 3133 | GLPVCAFSSAGPCAL | | | | | | | | | | | | | |
| 2987 | VCQRIVGLL | 3134 | DWKVCQRIVGLLGFA | 0.0120 | | −0.0026 | | 0.0030 | | 0.2500 | | | 0.0018 | | | 0.0130 |
| 2988 | VFADATPTG | 3135 | LCQVFADATPTGWGL | 0.0020 | | | | 0.9600 | | | | | 0.0013 | | | |
| 2989 | VGLSPVWL | 3136 | QWFVGLSPTWLSVI | | | | | | | | | | | | | |
| 2990 | VGPLTVNEK | 3137 | QQYVGPLTVNEKRRL | | | | | | | | | | | | | |
| 2991 | VHFASPLHV | 3138 | PDRVHFASPLHVAWR | 0.0610 | 0.0290 | 0.0008 | | 0.0008 | 0.0054 | 0.0008 | | 0.0190 | 0.0810 | 0.0035 | 0.2400 | |
| 2992 | VLCLRPVGA | 3139 | ARDVLCLRPVGAESR | | | | | | | | | | | | | |
| 2993 | VLGAKSVQH | 3140 | DDWLGAKSVQHLES | | | | | | | | | | | | | |
| 2994 | VLHKRTLGL | 3141 | LPKVLHKRTLGLSAM | | | | | | | | | | | | | |
| 2995 | VPNLQSLTN | 3142 | KFAVPNLQSLTNLLS | 0.0180 | 0.0005 | −0.0003 | | 0.1300 | | 0.0043 | | 0.0088 | −0.0003 | | 0.0056 | |
| 2996 | VQASKLCLG | 3143 | CPTVQASKLCLGWLW | | | | | | | | | | | | | |
| 2997 | VRFSWLSLL | 3144 | WASVRFSWLSLLVPF | | | | | | | | | | | | | |
| 2998 | VRRAFPHCL | 3145 | CSVVRRAFPHCLAFS | 0.1000 | 0.1024 | 0.0770 | 0.00320.0016 | −0.0022 | 0.0008 | −0.0013 | 0.0540 | 0.0590 | 0.0250 | 1.2000 | 0.0460 | |
| 2999 | VSIPWTHKV | 3146 | NLNVSIPWTHKVGNF | 0.0001 | | −0.0005 | −0.0041 | −0.0007 | | −0.0002 | | | 0.0005 | | | 0.0009 |
| 3000 | VWIRTPPAY | 3147 | SFGVWIRTPPAYRPP | 0.0094 | 0.0110 | 0.4300 | −0.0009 | 0.0780 | 0.0630 | 0.0260 | 0.0071 | 0.0002 | 0.0240 | 0.2500 | 0.0800 | 0.0016 |
| 3001 | VYVPSALNP | 3148 | TSFVYVPSALNPADD | | | | | | | | | | | | | |
| 3002 | WFHISCLTF | 3149 | QLLWFHSCLTFGRE | | | | | | | | | | | | | |
| 3003 | WFVGLSPTV | 3150 | FVQWFVGLSPTVWLS | 0.4700 | 0.0035 | 0.0160 | −0.0013 | 0.0130 | | 0.0072 | 0.0021 | 0.0190 | 0.0690 | 0.0180 | 0.0410 | 0.0044 |
| 3004 | WILRGTSFV | 3151 | AANWILRGTSFVYVP | 0.0920 | 0.0240 | 0.0061 | 0.00230.0510 | 0.0250 | 0.0140 | 0.3700 | 0.0250 | 0.5800 | 0.2500 | 0.2700 | | |
| 3005 | WIRTPPAYR | 3152 | FGVWIRTPPAYRPPN | | | | | | | | | | | | | |
| 3006 | WKAGILYKR | 3153 | HTLWKAGILYKRETT | | | | | | | | | | | | | |
| 3007 | WLLGCAANW | 3154 | SFPWLLGCAANWLR | | | | | | | | | | | | | |
| 3008 | WLSLDVSAA | 3155 | NLSWLSLDVSAAFYH | 0.1400 | 0.0003 | −0.0005 | 1.3000 | 0.2900 | | 0.0033 | 0.0022 | 0.0330 | 0.0041 | 0.0150 | 0.0620 | 2.4000 |
| 3009 | WLSLLVPFV | 3156 | RFSWLSLLVPFVQWF | 0.0430 | | 0.0009 | | −0.0007 | | 0.0002 | | | 0.0005 | | | 0.0031 |
| 3010 | WPKFAVPNL | 3157 | RVSWPKFAVPNLQSL | | | | | | | | | | | | | |
| 3011 | YMDDVVLGA | 3158 | AFSYMDDVVLGAKSV | 0.0027 | | −0.0005 | 0.0130 | 2.9000 | | 0.0006 | | | −0.0003 | | | −0.0005 |
| 3012 | YPALMPLYA | 3159 | QCGYPALMPLYACIQ | 0.0062 | | 0.0018 | | 0.0068 | | 0.0023 | | | 0.0006 | | | |
| 3013 | YQGMLPVCP | 3160 | LLDYQGMLPVCPLIP | | | | | | | | | | | | | |
| 3014 | YRPPNAPIL | 3161 | PPAYRPPNAPILSTL | 0.0056 | | −0.0005 | | 0.0038 | | 0.0022 | | | 0.0024 | | | 0.0015 |
| 3015 | YRWMCLRRF | 3162 | CPGYRWMCLRRFIIF | | | | | | | | | | | | | |
| 3016 | YSHPIILGF | 3163 | LHLYSHPILGFRKI | 0.0220 | 0.0340 | 0.0400 | 0.0040 | 0.8800 | 0.1600 | 0.0410 | 0.0310 | 0.0002 | 0.0006 | 0.0610 | 0.0490 | |
| 3017 | YSLNFMGYV | 3164 | RWGYSLNFMGYVIGS | | | | | | | | | | | | | |
| 3018 | YVPSALNPA | 3165 | SFVYVPSALNPADDP | | | | | | | | | | | | | |
| 3019 | FFCLWWIZ | | | | | | | | | | | | | | | |
| 3020 | MGTNLSVPN | | | | | | | | | | | | | | | |

[0436] TABLE XXa

HBV DR-3A Motif

| | | | | | | | |
|---|---|---|---|---|---|---|---|
| | Core SEQ | Core | | Core | Exemplary | Exemplary | Position in |
| Protein | ID NO: | Sequence | Core Freq. | Conservancy (%) | SEQ ID NO: | Sequence | Poly-Protein |

| | | | | | | | |
|---|---|---|---|---|---|---|---|
| ENV | 3166 | FFPDHQLDP | 19 | 95 | 3181 | PLGFFPQLDPAFG | 10 |
| NUC | 3167 | FGRETVLEY | 15 | 75 | 3182 | CLTFGRETVLEYLVS | 136 |
| POL | 3168 | FGVEPSGSG | 15 | 75 | 3183 | RRSFGVEPSGSGHD | 241 |
| POL | 3189 | FLVDKNPHN | 20 | 100 | 3184 | GGVFLVDKNPHNTTE | 360 |
| POL | 3170 | IGTDNSVVL | 16 | 80 | 3185 | AKLIGTDNSVVLSRK | 731 |
| POL | 3171 | LEEELPRLA | 18 | 90 | 3186 | AGPLEEELPRLADEG | 18 |
| POL | 3172 | LPLDKGIKP | 20 | 100 | 3187 | TKYLPLDKGIKYYP | 120 |
| POL | 3173 | LSLDVSAAF | 19 | 95 | 3188 | LSWLSLDVSAAFYHI | 412 |
| POL | 3174 | LVVDFSDFS | 20 | 100 | 3189 | ESRLVVDFSQFSRGN | 374 |
| NUC | 3175 | LYREALESP | 17 | 85 | 3190 | ASALYREALESPEHC | 34 |
| NUC | 3176 | MDIDPYKFE | 17 | 85 | 3191 | LWGMDIDPYKEFGAS | 27 |
| POL | 3177 | VAEDLNLGN | 20 | 100 | 3192 | NRRVAEDLNLGNLNV | 34 |
| POL | 3178 | VFADATPTG | 19 | 95 | 3193 | LCQVFADATPTGWGL | 683 |
| ENV | 3179 | VLLDYQGML | 19 | 95 | 3194 | FLLVLLDYQGMLPVC | 256 |
| POL | 3180 | YMDDVVLGA | 18 | 90 | 3195 | AFSYMDDVVLGAKSV | 535 |

| | | |
|---|---|---|
| | Exemplary Sequence | Exemplary Sequence |
| Protein | Frequency | Consrvancy (%) |

| | | |
|---|---|---|
| ENV | 9 | 95 |
| NUC | 14 | 75 |
| POL | 6 | 75 |
| POL | 11 | 100 |
| POL | 13 | 80 |
| POL | 13 | 90 |
| POL | 20 | 100 |
| POL | 11 | 95 |
| POL | 9 | 100 |
| NUC | 17 | 85 |
| NUC | 1 | 85 |
| POL | 17 | 100 |
| POL | 19 | 95 |
| ENV | 18 | 95 |
| POL | 18 | 90 |

[0437] TABLE XXb

HCV DR 3A Motif

| | | | | | | | | | | | |
|---|---|---|---|---|---|---|---|---|---|---|---|
| Core SEQ | Core | SEQ ID | Exemplary | | | | | | | | |
| ID NO: | Sequence | NO: | Sequence | DR1 | DR2w2β1 | DR2w2β2 | DR3 | DR4w4 | DR4w15 | DR5w11 | DR5w12 |

| | | | | | | | | | |
|---|---|---|---|---|---|---|---|---|---|
| 3166 | FFPDHQLDP | 3181 | PLGFFPDHQLDPAFG | | | | | | |
| 3167 | FGRETVLEY | 3182 | CLTFGRETVLEYLVS | | | | | | |
| 3168 | FGVEPSGSG | 3183 | RRSGFVEPSGSGHD | | | | | | |
| 3189 | FLYDKNPHN | 3184 | GGVFLVDKNPHNTTE | | | | 0.0790 | | |
| 3170 | IGTDNSVVL | 3185 | AKLIGTDNSVVLSRK | | | | | | |
| 3171 | LEEELPRLA | 3186 | AGLEEELPRLADEG | | | | 0.0022 | | |
| 3172 | LPLDKGIKP | 3187 | TKYLPLDKGKPYYP | | | | −0.0017 | | |
| 3173 | LSLDVSAAF | 3186 | LSWLSLDVSAAFYHI | | | | | | |
| 3174 | LVVDFSQFS | 3189 | ESRLVVDFSQFSRGN | 0.0007 | 0.0074 | −0.0010 | 2.8000 | | 0.0004 |
| 3175 | LYREALESP | 3190 | ASALYREALESPEHC | | | | | | |
| 3176 | MDIDPYKEF | 3191 | LWGMDIDPYKEFGAS | | | | | | |
| 3177 | VAEDLNLGN | 3192 | NRRVAEDLNLGNLNV | | | | 0.1400 | | |
| 3178 | VFADATPTG | 3193 | LCQVFADATPTGWGL | 0.0020 | | | | 0.9600 | |
| 3179 | VLLDYQGML | 3194 | FLLVLLDYQGMLPVC | | | | 0.0170 | | |
| 3180 | YMDDVVLGA | 3195 | AFSYMDDVVLGAKSV | 0.0027 | | −0.0005 | 0.0130 | 2.9000 | 0.0006 |

| | | | | | |
|---|---|---|---|---|---|
| Core SEQ | | | | | |
| ID NO: | DR8w19 | DR7 | DR8W2 | DR9 | DRW53 |

| | | | | |
|---|---|---|---|---|
| 3166 | | | | |
| 3167 | | | | |
| 3168 | | | | |
| 3189 | | | | |
| 3170 | | | | |
| 3171 | | | | |
| 3172 | | | | |
| 3173 | | | | |
| 3174 | 0.4000 | −0.0014 | 0.0029 | |
| 3175 | | | | |
| 3176 | | | | |
| 3177 | | | | |
| 3178 | | 0.0013 | | |
| 3179 | | | | |
| 3180 | | −0.0003 | | −0.0005 |

[0438] TABLE XXc

HBV DR-3B Motif

| | | | | | | | | | |
|---|---|---|---|---|---|---|---|---|---|
| | Core | | | Core | | | Position In | Exemplary | |
| | SEQ | Core | Core | Conservancy | | Exemplary | HBV | Sequence | Exemplary |
| Protein | ID NO: | Sequence | Freq. | (%) | SEQ ID NO: | Sequence | Poly-Protein | Frequency | Sequence |

| | | | | | | | | | |
|---|---|---|---|---|---|---|---|---|---|
| X | 3196 | AHLSLRGLP | 18 | 90 | 3202 | DNGAHLSLRGLPVCA | 48 | 18 | 90.00 |
| POL | 3197 | FSPTYKAFL | 19 | 95 | 3203 | AFTFSPTYKAFLCKQ | 655 | 11 | 55.00 |
| POL | 3198 | IPWTHKVGN | 20 | 100 | 3204 | NVSIPWTHKVGNFTG | 47 | 20 | 100.00 |
| POL | 3199 | LTVNEKRRL | 17 | 85 | 3205 | VGPLTVNEKRRLKLI | 98 | 12 | 60.00 |
| X | 3200 | VGAESRGRP | 19 | 95 | 3206 | LRPVGAESRGPVSG | 18 | 7 | 35.00 |
| POL | 3201 | VVLSRKYTS | 18 | 90 | 3207 | DNSVVLSRKYTSFPW | 737 | 17 | 85.00 |

[0439] TABLE XXd

HBV DR-3B Motif With Binding Information

| | | | | | | | | | | | |
|---|---|---|---|---|---|---|---|---|---|---|---|
| Core SEQ | Core | SEQ ID | | | | | | | | | |
| ID NO: | Sequence | NO: | Exemplary Sequence | DR1 | DR2w2β1 | DR2w2β2 | DR3 | DR4w4 | DR4w15 | DR5w11 | DR5w12 |

| | | | | | | | | |
|---|---|---|---|---|---|---|---|---|
| 3196 | AHLSLRGLP | 3202 | DHGAAHLSLRGLPVCA | | | | | |
| 3197 | FSPTYKAFL | 3203 | AFTFSPTYKAFLCKQ | | | | 0.0035 | |
| 3198 | IPWTHKVGN | 3204 | NVSIPWTHKVGNFTG | | | | | |
| 3199 | LTVNEKRRL | 3205 | VGPLTVNEKRRLKLI | 0.0006 | 0.0022 | 0.0047 | 2.2000 | 0.0030 |
| 3200 | VGAESRGRP | 3206 | LRPVGAESRGRPVSG | | | | −0.0017 | |
| 3201 | VVLSRKYTS | 3207 | DNSVVLSRKYTSFPW | | | | | |

[0440] TABLE XXI
Population coverage with combined HLA Supertypes

| | PHENOTYPIC FREQUENCY | | | | | |
|---|---|---|---|---|---|---|
| | | North | | | | |
| | | American | | | | |
| HLA-SUPERTYPES | Caucasian | Black | Japanese | Chinese | Hispanic | Average |
| a. Individual Supertypes | | | | | | |
| A2 | 45.8 | 39.0 | 42.4 | 45.9 | 43.0 | 43.2 |
| A3 | 37.5 | 42.1 | 45.8 | 52.7 | 43.1 | 44.2 |
| B7 | 38.6 | 52.7 | 48.8 | 35.5 | 47.1 | 44.7 |
| A1 | 47.1 | 16.1 | 21.8 | 14.7 | 26.3 | 25.2 |
| A24 | 23.9 | 38.9 | 58.6 | 40.1 | 38.3 | 40.0 |
| B44 | 43.0 | 21.2 | 42.9 | 39.1 | 39.0 | 37.0 |
| B27 | 28.4 | 26.1 | 13.3 | 13.9 | 35.3 | 23.4 |
| B62 | 12.6 | 4.8 | 36.5 | 25.4 | 11.1 | 18.1 |
| B58 | 10.0 | 25.1 | 1.6 | 9.0 | 5.9 | 10.3 |
| b. Combined Supertypes | | | | | | |
| A2, A3, B7 | 83.0 | 86.1 | 87.5 | 88.4 | 86.3 | 86.2 |
| A2, A3, B7, A24, B44, A1 | 99.5 | 98.1 | 100.0 | 99.5 | 99.4 | 99.3 |
| A2, A3, B7, A24, B44, A1, | 99.9 | 99.6 | 100.0 | 99.8 | 99.9 | 99.8 |
| B27, B62, B58 | | | | | | |

[0441] TABLE XXII
HBV ANALOGS

| | | | | | | | | | | |
|---|---|---|---|---|---|---|---|---|---|---|
| | | | | A2 | A3 | | B7 | 1* | | |
| | | Fixed | A1 | Super | Super | A24 | Super | Anchor | | SEQ ID |
| AA | Sequence | Nomen | Motif | Motif | Motif | Motif | Motif | Fixer | Analog | NO: |

| | | | | | | | | | | |
|---|---|---|---|---|---|---|---|---|---|---|
| 10 | CILLLCLIFL | | N | Y | N | N | N | No | A | 3208 |
| 9 | RMTGGVFLV | VM2.V9 | N | Y | N | N | N | 1 | A | 3209 |
| 9 | LMPFVQWFV | VM2.V9 | N | Y | N | N | N | 1 | A | 3210 |
| 9 | RLTGGVFLV | VL2.V9 | N | Y | N | N | N | 1 | A | 3211 |
| 9 | GLCQVFADV | L2.AV9 | N | Y | N | N | N | 1 | A | 3212 |
| 9 | WLLRGTSFV | IL2.V9 | N | Y | N | N | N | 1 | A | 3213 |
| 9 | NLGNLNVSV | L2.IV9 | N | Y | N | N | N | 1 | A | 3214 |
| 9 | YLPSALNPV | VL2.AV9 | N | Y | N | N | N | 1 | A | 3215 |
| 9 | GLWIRTPPV | VL2.AV9 | N | Y | N | N | N | 1 | A | 3216 |
| 9 | RLSWPKFAV | VL2.V9 | N | Y | N | N | N | 1 | A | 3217 |
| 9 | ILGLLGFAV | VL2.AV9 | N | Y | N | N | N | 1 | A | 3218 |
| 9 | RMLTIPQSV | IM2.LV9 | N | Y | N | N | N | 1 | A | 3219 |
| 9 | SLDSWWTSV | L2.LV9 | N | Y | N | N | N | 1 | A | 3220 |
| 10 | FMLLLCLIFL | IM2.L10 | N | Y | N | V | N | 1 | A | 3221 |
| 10 | LMLQAGFFLV | VM2.LV | N | Y | N | N | N | 1 | A | 3222 |
| 10 | SMLSPFLPLV | IM2.LV1 | N | Y | N | N | N | 1 | A | 3223 |
| 10 | LMLLDYQGMV | VM2.LV | N | Y | N | N | N | 1 | A | 3224 |
| 10 | FLGLSPTVWV | VL2.LV1 | N | Y | N | N | N | 1 | A | 3225 |
| 8 | FPMMPHL | | N | N | N | N | Y | A | 3226 | |
| 8 | HPFAMPHL | | N | N | N | N | Y | A | 3227 | |
| 8 | HPAAMPHI | | N | N | N | N | Y | A | 3228 | |
| 8 | FMFSPTYK | | N | N | Y | N | N | A | 3229 | |
| 8 | FVFSPTYK | | N | N | Y | N | N | A | 3230 | |
| 9 | FLLTRILTV | L2.IV9 | N | Y | N | N | N | 1 | A | 3231 |
| 9 | ALMPLYACV | L2.IV9 | N | Y | N | N | N | 1 | A | 3232 |
| 9 | LLAQFTSAV | L2.IV9 | N | Y | N | N | N | 1 | A | 3233 |
| 9 | LLPFVQWFV | VL2.V9 | N | Y | N | N | N | 1 | A | 3234 |
| 9 | FLLAQFTSV | L2.AV9 | N | Y | N | N | N | 1 | A | 3235 |
| 9 | KLHLYSHPV | L2.IV9 | N | Y | N | N | N | 1 | A | 3236 |
| 9 | KLFLYSHPI | | N | Y | N | N | N | No | A | 3237 |
| 9 | LLSSLSWV | L2.LV9 | N | Y | N | N | N | 1 | A | 3238 |
| 9 | FLLSLGIHV | L2.LV9 | N | Y | N | N | N | 1 | A | 3239 |
| 9 | MMWYWGPSV | M2.LV9 | N | Y | N | N | N | 1 | A | 3240 |
| 9 | VLQAGFFLV | L2.LV9 | N | Y | N | N | N | 1 | A | 3241 |
| 9 | PLLPIFFCV | L2.LV9 | N | Y | N | N | N | 1 | A | 3242 |
| 9 | FLLPIFFCL | | N | Y | N | N | N | No | A | 3243 |
| 9 | VLLDYQGMV | L2.LV9 | N | Y | N | N | N | 1 | A | 3244 |
| 9 | YMFDVVLGA | | N | Y | N | N | N | No | A | 3245 |
| 9 | GLLGWSPQV | L2.AV9 | N | Y | N | N | N | 1 | A | 3246 |
| 9 | FPAAMPHLL | | N | N | N | N | Y | | A | 3247 |
| 9 | HPFAMPHLL | | N | N | N | N | Y | | A | 3248 |
| 9 | HPAAMPHLI | | N | N | N | N | Y | | A | 3249 |
| 9 | FPVCAFSSA | | N | N | N | N | Y | | A | 3250 |
| 9 | LPFCAFSSA | | N | N | N | N | Y | | A | 3251 |
| 9 | LPVCAFSSI | | N | N | N | N | Y | | A | 3252 |
| 9 | FPALMPLYA | | N | N | N | N | Y | | A | 3253 |
| 9 | YPFLMPLYA | | N | N | N | N | Y | | A | 3254 |
| 9 | YPALMPLYI | | N | N | N | N | Y | | A | 3255 |
| 9 | FPSRGRLGL | | N | N | N | N | Y | | A | 3256 |
| 9 | DPFRGRLGL | | N | N | N | N | Y | | A | 3257 |
| 9 | DPSRGRLGI | | N | N | N | N | Y | | A | 3258 |
| 9 | SMICSVVRR | | N | N | Y | N | N | | A | 3259 |
| 9 | SVICSVVRR | | N | N | Y | N | N | | A | 3260 |
| 9 | KVGNFTGLK | | N | N | Y | N | N | | A | 3261 |
| 9 | KVNGFTGLR | | N | N | Y | N | N | | A | 3262 |
| 9 | WFFSQFSR | | N | N | Y | N | N | | A | 3263 |
| 9 | SVNRPIDWK | | N | N | Y | N | N | | A | 3264 |
| 9 | TLWKAGILK | | N | N | Y | N | N | | A | 3265 |
| 9 | TLWKAGILR | | N | N | Y | N | N | | A | 3266 |
| 9 | TMWKAGILY | | Y | N | Y | N | N | | A | 3267 |
| 9 | TVWKAGILY | | N | N | Y | N | N | | A | 3288 |
| 9 | RMYLHTLWK | | N | N | Y | N | N | | A | 3269 |
| 9 | RVYLHTLWK | | N | N | Y | N | N | | A | 3270 |
| 9 | AMTFSPTYK | | N | N | Y | N | N | | A | 3271 |
| 9 | SVVRRAFPR | | N | N | Y | N | N | | A | 3272 |
| 9 | SVVRRAFPK | | N | N | Y | N | N | | A | 3273 |
| 9 | SAIXSVVRR | | N | N | Y | N | N | | A | 3274 |
| 9 | LPVXAFSSA | | N | N | N | N | Y | | A | 3275 |
| 10 | FLLAQFTSAV | L2.LV10 | N | Y | N | N | N | 1 | A | 3276 |
| 10 | YLFTWKAGI | | N | Y | N | N | N | No | A | 3277 |
| 10 | YLLTLWKAGI | | N | Y | N | N | N | No | A | 3278 |
| 10 | LLFYQGMILPV | | N | Y | N | N | N | No | A | 3279 |
| 10 | LLLYQGMILPV | | N | Y | N | N | N | No | A | 3280 |
| 10 | LLVLQAGFFV | L2.LV10 | N | Y | N | N | N | 1 | A | 3281 |
| 10 | ILLLCLIFLV | L2.LV10 | N | Y | N | N | N | 1 | A | 3282 |
| 10 | FPFCLAFSYM | | N | N | N | N | Y | | A | 3283 |
| 10 | FPHCLAFSYI | | N | N | N | N | Y | | A | 3284 |
| 10 | FPARVTGGVF | | N | N | N | N | Y | | A | 3285 |
| 10 | TPFRVTGGVF | | N | N | N | N | Y | | A | 3286 |
| 10 | TPARVTGGVI | | N | N | N | N | Y | | A | 3287 |
| 10 | FPCALRFTSA | | N | N | N | N | Y | | A | 3288 |
| 10 | GPFALRFTSA | | N | N | N | N | Y | | A | 3289 |
| 10 | GPCALRFTSI | | N | N | N | N | Y | | A | 3290 |
| 10 | FPAAMPHLLV | | N | N | N | N | Y | | A | 3291 |
| 10 | HPFAMPHLLV | | N | N | N | N | Y | | A | 3292 |
| 10 | HPAAMPHLLI | | N | N | N | N | Y | | A | 3293 |
| 10 | QMFTFSPTYK | | N | N | Y | N | N | | A | 3294 |
| 10 | QVFTFSPTYK | | N | N | Y | N | N | | A | 3295 |
| 10 | TMWKAGILYK | | N | N | Y | N | N | | A | 3296 |
| 10 | TVWKAGILYK | | N | N | Y | N | N | | A | 3297 |
| 10 | VMGGVFLVDK | | N | N | Y | N | N | | A | 3298 |
| 10 | VVGGVFLVDK | | N | N | Y | N | N | | A | 3299 |
| 10 | SMLPETTVVR | | N | N | Y | N | N | | A | 3300 |
| 10 | SVLPETTVVR | | N | N | Y | N | N | | A | 3301 |
| 10 | TMPETTVVRR | | N | N | Y | N | N | | A | 3302 |
| 10 | TVPETTVVRR | | N | N | Y | N | N | | A | 3303 |
| 10 | HTLWKAGILK | | N | N | Y | N | N | | A | 3304 |
| 10 | HTLWKAGILR | | N | N | Y | N | N | | A | 3305 |
| 10 | HMLWKAGILY | | Y | N | Y | N | N | | A | 3306 |
| 10 | HVLWKAGILY | | N | N | Y | N | N | | A | 3307 |
| 10 | GMDNSVVLSR | | N | N | Y | N | N | | A | 3308 |
| 10 | GVDNSVVLSR | | N | N | Y | N | N | | A | 3309 |
| 10 | GTFNSVVLSR | | N | N | Y | N | N | | A | 3310 |
| 10 | YMFDVVLGAK | | N | N | Y | N | N | | A | 3311 |
| 10 | MMWYWGPSLK | | N | N | Y | N | N | | A | 3312 |
| 10 | MMWYWGPSLR | | N | N | Y | N | N | | A | 3313 |
| 9 | ILLLXLIFL | | N | Y | N | N | N | | A | 3314 |
| 9 | LLLXLIFLL | | N | Y | N | N | N | | A | 3315 |
| 9 | LLXLIFLLV | | N | Y | N | N | N | | A | 3316 |
| 9 | PLLPIFFXL | | N | Y | N | N | N | | A | 3317 |
| 9 | ALMPLYAXI | | N | Y | N | N | N | | A | 3318 |
| 9 | GLXQVFADA | | N | Y | N | N | N | | A | 3319 |
| 9 | HISXLTFGR | | N | N | Y | N | N | | A | 3320 |
| 9 | FVLGGXRHK | | N | N | Y | N | N | | A | 3321 |
| 10 | FILLLXLIFL | | N | Y | N | N | N | | A | 3322 |
| 10 | ILLLXLIFLL | | N | Y | N | N | N | | A | 3323 |
| 10 | LLLXLIFLLV | | N | Y | N | N | N | | A | 3324 |
| 10 | LLPIFFXLWV | | N | Y | N | N | N | | A | 3325 |
| 10 | QLLWFHISXL | | N | Y | N | N | N | | A | 3326 |
| 10 | LLGXAANWIL | | N | Y | N | N | N | | A | 3327 |
| 10 | TSAIXSVVAR | | N | N | V | N | N | | A | 3328 |
| 10 | GYRWMXLRRF | | N | N | N | Y | N | | A | 3329 |
| 10 | GPXALRFTSA | | N | N | N | N | Y | | A | 3330 |
| 10 | FPHXLAFSVM | | N | N | N | N | Y | | A | 3331 |
| 11 | HMLWKAGILYK | | N | N | Y | N | N | | A | 3332 |
| 11 | HVLWKAGILYK | | N | N | Y | N | N | | A | 3333 |
| 11 | SMLPETTVVRR | | N | N | Y | N | N | | A | 3334 |
| 11 | SVLPETTVVRR | | N | N | Y | N | N | | A | 3335 |
| 11 | GMDNSVVLSRK | | N | N | Y | N | N | | A | 3336 |
| 11 | GVDNSVVLSRK | | N | N | Y | N | N | | A | 3337 |
| 11 | GTFNSVVLSRK | | N | N | Y | N | N | | A | 3338 |
| 8 | MPLSYQHI | | N | N | N | N | Y | | A | 3339 |
| 8 | LPIFFCLI | | N | N | N | N | Y | | A | 3340 |
| 8 | SPFLLAQI | | N | N | N | N | Y | | A | 3341 |
| 8 | YPALMPLI | | N | N | N | N | Y | | A | 3342 |
| 8 | VPSALNPI | | N | N | N | N | Y | | A | 3343 |
| 9 | LPIFFCLWI | | N | N | N | N | Y | | A | 3344 |
| 9 | LPIHTAELI | | N | N | N | N | Y | | A | 3345 |
| 10 | VPFVQWFVGI | | N | N | N | N | Y | | A | 3346 |
| 11 | NPLGFFPDHQI | | N | N | N | N | Y | | A | 3347 |
| 11 | LPIHTAELLAI | | N | N | N | N | Y | | A | 3348 |
| 9 | FLPSVFPSA | L2.FV5 | N | Y | N | N | N | Rev3 | A | 3349 |
| 10 | YLHTLWKAGV | L2.IV10 | N | Y | N | N | N | 1 | A | 3350 |
| 11 | STLPETYVVRR | | N | N | Y | N | N | | A | 3351 |
| 9 | YMDDVVLGV | M2.AV9 | N | Y | N | N | N | 1 | A | 3352 |
| 9 | FPIPSSWAF | | N | N | N | N | Y | | A | 3353 |
| 9 | IPITSSWAF | | N | N | N | N | Y | | A | 3354 |
| 9 | IPILSSWAF | | N | N | N | N | Y | | A | 3355 |
| 9 | FPVCLAFSY | | N | N | N | N | Y | | A | 3356 |
| 9 | FPHCLAFAY | | N | N | N | N | Y | | A | 3357 |
| 9 | FPHCLAFSL | | N | N | N | N | Y | | A | 3358 |
| 9 | IPIPMSWAF | | N | N | N | N | Y | | A | 3359 |
| 9 | FPHCLAFAL | | N | N | N | N | Y | | A | 3360 |
| 10 | FLPSZFFPSV | | N | Y | N | N | N | No | A | 3361 |
| 10 | FLPSZFFPSV | | N | Y | N | N | N | No | A | 3362 |
| 9 | IPFPSSWAF | | N | N | N | N | Y | | A | 3363 |
| 9 | IPIPSSWAI | | N | N | N | N | Y | | A | 3364 |
| 9 | FPFCLAFSY | | N | N | N | N | Y | | A | 3365 |
| 9 | FPHCLAFSA | | N | N | N | N | Y | | A | 3366 |
| 9 | FPHCLAFSA | | N | N | N | N | Y | | A | 3367 |
| 10 | FQPSDYFPSV | | N | Y | N | N | N | Rev | A | 3368 |
| 9 | YLLTRILTI | | N | Y | N | N | N | | A | 3369 |
| 9 | FLYTRILTI | | N | Y | N | N | N | | A | 3370 |
| 9 | FLLTYILTI | | N | Y | N | N | N | | A | 3371 |
| 9 | FLLTRILYI | | N | Y | N | N | N | | A | 3372 |
| 11 | FLPSDFFPSVR | | N | N | Y | N | N | | A | 3373 |
| 9 | FLPSDFFPS | | N | N | N | N | N | | A | 3374 |
| 8 | FLPSDFFP | | N | N | N | N | N | | A | 3375 |
| 10 | FLPSDFFPSI | L2.V110 | N | Y | N | N | N | Rev | A | 3376 |
| 10 | FLPSDYFPSV | | N | Y | N | N | N | No | A | 3377 |
| 12 | YSFLSDFFPSV | | N | N | N | N | N | | A | 3378 |
| 10 | YNMGLKFRQL | | N | N | N | N | N | | A | 3379 |
| 9 | NMGLKYRQL | | N | Y | N | Y | N | No | A | 3380 |
| 10 | FLPS(X)YFPSV | | N | N | N | N | N | | A | 3381 |
| 10 | FLPSD(X)FPSV | | N | N | N | N | N | | A | 3382 |
| 11 | FLPSDLLPSVR | | N | N | N | N | N | | A | 3383 |
| 12 | FLPSDFFPSVRD | | N | N | N | N | N | | A | 3384 |
| 12 | LSFLPSDFFPSV | | N | N | N | N | N | | A | 3385 |
| 11 | SFLPSDFFPSV | | N | N | N | N | N | | A | 3386 |
| 8 | PSDFFPSV | | N | N | N | N | N | | A | 3387 |
| 9 | FLMSYFPSV | | N | Y | N | N | N | No | A | 3388 |
| 9 | FLPSYFPSV | L2.FY5. | N | Y | N | N | N | 3 | A | 3389 |
| 10 | FLMSDYFPSV | | N | Y | N | N | N | No | A | 3390 |
| 11 | CILLLCLIFLL | | N | Y | N | N | N | No | A | 3391 |
| 10 | FLPNDFFPSA | L2.SN4. | N | Y | N | N | N | Rev | A | 3392 |
| 10 | FLPDDFFPSA | L2.SD4. | N | Y | N | N | N | Rev | A | 3393 |
| 10 | FLPNDFFPSV | | N | Y | N | N | N | No | A | 3394 |
| 10 | FLPSDFFPSA | L2.VA10 | N | Y | N | N | N | Rev | A | 3395 |
| 10 | FLPDDFFPSV | | N | Y | N | N | N | No | A | 3396 |
| 10 | FLPPADFFPSV | | N | Y | N | N | N | No | A | 3397 |
| 10 | FLPVDFFPSV | | N | Y | N | N | N | No | A | 3398 |
| 10 | FLPADFFPSI | L2.SA4. | N | Y | N | N | N | Rev | A | 3399 |
| 10 | FLPVDFFPSI | L2.SV4. | N | Y | N | N | N | Rev | A | 3400 |
| 10 | FLPSDAFPSV | | N | Y | N | N | N | No | A | 3401 |
| 10 | FLPSAFFPSV | | N | Y | N | N | N | No | A | 3402 |
| 10 | FLPSDFAPSV | | N | Y | N | N | N | No | A | 3403 |
| 10 | FLPSDFFASV | | N | Y | N | N | N | No | A | 3404 |
| 10 | FLPSDFFPAV | | N | Y | N | N | N | No | A | 3405 |
| 10 | FLASDFFPSV | | N | Y | N | N | N | No | A | 3406 |
| 10 | FAPSDFFPSV | LA2.V10 | N | Y | N | N | N | Rev | A | 3407 |
| 10 | ALPSSFFPSV | | N | Y | N | N | N | No | A | 3408 |
| 10 | YLPSDFFPSV | | Y | N | N | N | No | A | 3409 | |
| 10 | FMPSDFFPSV | LM2.V1 | N | Y | N | N | N | 1 | A | 3410 |
| 10 | FLKSDFFPSV | | N | Y | N | N | N | No | A | 3411 |
| 10 | FLPSEFFPSV | | N | Y | N | N | N | No | A | 3412 |
| 10 | FLPSDFYPSV | | N | Y | N | N | N | No | A | 3413 |
| 10 | FLPSDFFKSV | | N | Y | N | N | N | No | A | 3414 |
| 10 | FLPSDFFPKV | | N | Y | N | N | N | No | A | 3415 |
| | FLPSDFFPSV(CONH2) | | | | | | | | | 3416 |
| | VLEYLVSFGV(NH2) | | | | | | | | | 3417 |
| | ATVELLSFLPSDFFPSV-NH2 | | | | | | | | | 3418 |
| | TVELLSFLPSDFFPSV-NH2 | | | | | | | | | 3419 |
| | VELLSFLPSDFFPSV-NH2 | | | | | | | | | 3420 |
| | ELLSFLPSDFFPSV-NH2 | | | | | | | | | 3421 |
| | LLSFLPSDFFPSV-NH2 | | | | | | | | | 3422 |
| | LSFLPSDFFPSV-NH2 | | | | | | | | | 3423 |
| | SFLPSDFFPSV-NH2 | | | | | | | | | 3424 |
| | FLPSDFFPSV-NH2 | | | | | | | | | 3425 |
| | LPSDFFPSV-NH2 | | | | | | | | | 3426 |
| | PSDFFPSV-NH2 | | | | | | | | | 3427 |
| | FLPSDFFPS-NH2 | | | | | | | | | 3428 |
| | FLPSDFFP-NH2 | | | | | | | | | 3429 |
| | FLPSDFF-NH2 | | | | | | | | | 3430 |
| | ALPSDFFPSV-NH2 | | | | | | | | | 3431 |
| | SLNFLGGTTV(NH2) | | | | | | | | | 3432 |
| | FLPSDFFPSVR-NH2 | | | | | | | | | 3433 |
| | ALFKDWEEL | | | | | | | | | 3434 |
| | VLGGSRHKL | | | | | | | | | 3435 |
| | KIKESFRKL | | | | | | | | | 3436 |
| | ALMPLYASI | | | | | | | | | 3437 |
| | FLSKQYLNL | | | | | | | | | 3438 |
| | LLGSAANWI | | | | | | | | | 3439 |
| | NNLNNLNVSI | | | | | | | | | 3440 |
| | IIKKSEQFV | | | | | | | | | 3441 |
| | ALSLIVNLL | | | | | | | | | 3442 |
| | RIPRTPRSV | | | | | | | | | 3443 |
| | | | | | | | | | | 3444 |
| | | | | | | | | | | 3445 |

[0442] TABLE XXIII

Immunogenicity of HLBY-derived peptides

Immunogenicity

| | | | | | | | | | |
|---|---|---|---|---|---|---|---|---|---|
| Supermotif | Peptide | Sequence | SEQ ID NO: | Protein | XRN | primary | transgenic | patients | overall¹ |

| | | | | | | | | | | |
|---|---|---|---|---|---|---|---|---|---|---|
| A2 supermotif | 924.07 | FLPSDFFPSV | 3492 | HBV core 18 | 5 | 10/10 | 6/6 | 25/32^{a} | + | |
| | 1069.06 | LLVPFVQWFV | 3493 | HBVV env 338 | 5 | 3/4 | 6/9 | | + | |
| | 1147.13 | FLLAQFTSAI | 3494 | HBV pol 513 | 5 | | 0/3 | | unk | |
| | 1090.77 | YMDDVVLGV | 3495 | HBV pol 538 | 5 | | 9/9 | | + | |
| | 777.03 | FLLTRILTI | 3496 | HBV env 183 | 4 | | | 14/23^{a} | + | |
| | 927.15 | ALMPLYACI | 3497 | HBV pol 642 | 4 | 10/12 | 3/5 | 2/15^{a} | + | |
| | 1013.01 | WLSLLVPFV | 3498 | HBV env 335 | 4 | 2/6 | 5/9 | 23/29^{a} | + | |
| | 1069.05 | LLAQFTSAI | 3499 | HBV pol 504 | 4 | 0/4 | 0/5 | | unk | |
| | 1132.01 | LVPFVQWFV | 3500 | HBV env 339 | 4 | 0/3 | 0/4 | | unk | |
| | 1147.14 | VLLDYQGMLPV | 3501 | HBV env 259 | 4 | 4/4 | 6/6 | | + | |
| | 927.41 | LLSSNLSWL | 3502 | HBV pol 992 | 3 | 0/4 | 0/3 | | unk | |
| | 927.42 | NLSWLSLDV | 3503 | HBV pol 411 | 3 | | 2/8 | | + | |
| | 927.46 | KLHLYSHPI | 3504 | HBV pol 489 | 3 | 0/4 | 4/6 | | + | |
| | 1069.07 | FLLAQFTSA | 3505 | HBV pol 503 | 3 | 1/2 | 0/3 | | + | |
| | 1168.02 | GLSRYVARL | 3506 | HBV pol 455 | 3 | | | 9/13^{a} | + | |
| A2 supermotif | 927.11 | FLLSLGIHL | 3507 | HBV pol 562 | 2 | 15/22 | 12/13 | 9/15^{a} | + | |
| | 927.47 | HLYSHPIIL | 3508 | HBV pol 1076 | 2 | | 10/14 | | + | |
| | 1039.03 | MMWYWGPSL | 3509 | HBV env 360 | 2 | 3/4 | 0/4 | | + | |
| | 1069.12 | YLHTLWKAGV | 3510 | HBV pol 147 | 2 | 2/4 | | | + | |
| | 1137.02 | LLDYQGMLPV | 3511 | HBV env 260 | 2 | 1/2 | 0/4 | | + | |
| | 1142.07 | GLLGWSPQA | 3512 | HBV env 62 | 2 | 3/4 | 5/6 | | + | |
| | 1.0573 | ILRGTSFVYV | 3513 | HBV pol 773 | 1 | | | 3/7^{b} | + | |
| | 1013.14 | VLQAGFFLL | 3514 | HBV env 177 | 1 | 0/4 | 5/12 | | + | |
| | 1069.10 | LLPIFFCLWV | 3515 | HBV env 378 | I | 3/3 | 0/4 | 2/5^{c} | | |
| | 1069.13 | PLLPIFFCL | 3516 | HBV env 377 | 1 | 0/4 | 7/12 | | + | |
| | 1090.06 | LLVLQAGFFL | 3517 | HBV env 175 | 1 | 1/5 | 0/4 | | + | |
| | 1090.12 | YLVSFGVWI | 3518 | HBV nuc 118 | 1 | 9/9 | | | + | |
| | 1.0518 | GLSPTVWLSV | 3519 | HBV eny 338 | 1 | | | 3/9^{c} | + | |
| | 1090.14 | YMDDVVLGA | 3520 | HBV pol 538 | 1 | 2/7 | 2/5 | 2/7^{b} | + | |
| A3 supermotif | 1147.16 | HTLWKAGILYK | 3521 | HBV POL 149 | 5 | 0/6 | 3/3 | 1/22 | + | |
| | 1083.01 | STLPETTVVRR | 3522 | HBV core 141 | 4 | 3/5 | 6/6 | 8/32 | + | |
| | 1150.51 | GSTHVSWPK | 3523 | HBV pol 398 | 4 | | 3/6 | | + | |
| | 1.02.19 | FVLGGCRHK | 3524 | HBV adr “X” 1550 | 3 | 0/4 | | unk | | |
| | 1069.16 | NVSIPWTHK | 3525 | HBV pol 47 | 3 | 0/8 | 0/3 | 1/21 | + | |
| | 1069.20 | LVVDFSQFSR | 3526 | HBV pol 388 | 3 | 0/4 | 6/6 | 1/22 | + | |
| | 1090.10 | QAFTFSPTYK | 3527 | HBV pol 665 | 3 | 3/6 | 0/3 | 3/21 | + | |
| | 1090.11 | SAICSVVRR | 3528 | HBV pok 531 | 3 | 1/4 | | 2/22 | + | |
| A3 supermotif | 1069.15 | TLWKAGILYK | 3529 | HBV pol 150 | 2 | 3/8 | 0/3 | 5/28 | + | |
| | 1142.05 | KVGNFTGLY | 3530 | HBV adr POL 629 | 2 | | 0/3 | 2/22 | + | |
| B7 supermotif | 1147.05 | FPHCLAFSYM | 3531 | HBV POL 530 | 5 | 1/3 | | 0/12 | + | |
| | 988.05 | LPSDFFPSV | 3532 | HBV core 19-27 | 4 | | | 2/16 | + | |
| | 1145.04 | IPIPSSWAF | 3533 | HBV ENV 313 | 4 | 0/4 | | 1/12 | + | |
| | 1147.02 | HPAAMPHLL | 3534 | HBV POL 429 | 4 | 0/5 | | 0/12 | unk | |
| | 1147.06 | LPVCAFSSA | 3535 | HBV X 58 | 4 | 1/4 | | | + | |
| | 1147.08 | YPALMPLYA | 3536 | HBV POL 640 | 4 | | | 0/12 | unk | |
| | 1145.08 | FPHCLAFSYM | 3537 | HBV POL 541 | 3 | 0/4 | | | unk | |
| B7 supermotif | 1147.04 | TPARVTGGVF | 3538 | HBV POL 354 | 2 | | | | 2/12 | + |

Immunogenicity evaluation derived from primary cultures, acute patients (a-Bertoni et al, J Clin Invest 100:503, b-Rehermann et al., J. Clin. Invest 97:1655, c-Nayersina et al., J. Immunol 150:4659) or transgenic mice. A positive assessment (+) is assigned when responders have been noted in one of these systems. Unk = unknown

[0443] TABLE XXIV

MHC-peptide binding assays: cell lines and radiolabeled ligands.

Radiolabeled peptide

| | | | | | | |
|---|---|---|---|---|---|---|
| | | | | | | SEQ ID |
| Species | Antigen | Allele | Cell line | Source | Sequence | NO: |

A. Class I binding assays

| | | | | | | |
|---|---|---|---|---|---|---|
| Human | A1 | A*0101 | Steinlin | Hu. J chain 102-110 | YTAVVPLVY | 3539 |
| | A2 | A*0201 | JY | HBVc 18-27 F6 -> Y | FLPSDYFPSV | 3540 |
| | A2 | A*0202 | P815 | HBVc 18-27 F6 -> Y | FLPSDYFPSV | 3540 |
| | | | (transfected) | | | |
| | A2 | A0203 | FUN | HBVc 18-27 F6 -> Y | FLPSDYFPSV | 3540 |
| | A2 | A0206 | CLA | HBVc 18-27 F6 -> Y | FLPSDYFPSV | 3540 |
| | A2 | A*0207 | 721.221 | HBVc 18-27 F6 -> Y | FLPSDYFPSV | 3540 |
| | | | (transfected) | | | |
| | A3 | | GM3107 | non-natural (A3CON1) | KVFPYALINK | 3541 |
| | All | | BVR | non-natural (A3CON1) | KVFPYALINK | 3541 |
| | A24 | A*2402 | KAS116 | non-natural (A24CON1) | AYLDNYNKF | 3542 |
| | A31 | A*3101 | SPACH | non-natural (A3CON1) | KVFPYALINK | 3541 |
| | A33 | A*3301 | LWAGS | non-natural (A3CON1) | KVFPYALINK | 3541 |
| | A28/68 | A*6801 | C1R | HBVc 141-151 T7 -> Y | STLPETYVVRR | 3543 |
| | A28/68 | A*6802 | AMAT | HBV pol 646-654 G4 -> A | FTQAGYPAL | 3544 |
| | B7 | B*0702 | GM3 107 | A2 sigal seq. 5-13 (L7 -> Y) | APRTLVYLL | 3545 |
| | B8 | B*0801 | Steinlin | HIV gp 586-593 Y1 -> F, Q5 -> Y | FLKDYQLL | 3546 |
| | B27 | B*2705 | LG2 | R 60s | FRYNGLIHR | 3547 |
| | B35 | B*3501 | CIR, BVR | non-natural (B35CON2) | FPFKYAAAF | 3548 |
| | B35 | B*3502 | TISI | non-natural (B35CON2) | FPFKYAAAF | 3548 |
| | B35 | B*3503 | EHM | non-natural (B35CON2) | FPFKYAAAF | 3548 |
| | B44 | B*4403 | PITOUT | EF-1 G6 -> Y | AEMGKYSFY | 3549 |
| | B51 | | KAS116 | non-natural (B35CON2) | FPFKYAAAF | 3550 |
| | B53 | B*5301 | AMAT | non-natural (B3SCON2) | FPFKYAAAF | 3550 |
| | B54 | B*5401 | KT3 | non-natural (B3SCON2) | FPFKYAAAF | 3550 |
| | Cw4 | Cw*0401 | C1R | non-natural (C4CON) | QYDDAVYKL | 3551 |
| | Cw6 | Cw*0602 | 721.221 | non-natural (C6CON1) | YRHDGGNVL | 3552 |
| | | | transfected | | | |
| | Cw7 | Cw*0702 | 721.221 | non-natural (C6CON1) | YRHDGGNVL | 3552 |
| | | | transfected | | | |
| Mouse | D^{b} | | EL4 | Adenovirus EIA P7 -> Y | SGPSNTYPEI | 3553 |
| | K^{b} | | EL4 | VSV NP 52-59 | RGYVFQGL | 3554 |
| | D^{d} | | P815 | HIV-IIIB ENV G4 -> Y | RGPYRAFVTI | 3555 |
| | K^{d} | | P815 | non-natural (KdCON1) | KFNPMLKTYI | 3556 |
| | L^{d} | | P815 | HBVs 28-39 | IPQSLDSYWTSL | 3557 |

B. Class II binding assays

| | | | | | | |
|---|---|---|---|---|---|---|
| Human | DR1 | DRB1*0101 | LG2 | HA Y307-319 | YPKYVKQNTLKLAT | 3558 |
| | DR2 | DRB1*1501 | L466.1 | MBP 88-102Y | VVHFFKNIVTPRTPPY | 3559 |
| | DR2 | DRB1*1601 | L242.5 | non-natural (760.16) | YAAFAAAKTAAAFA | 3560 |
| | DR3 | DRB1*0301 | MAT | MT 65kD Y3-13 | YKTIAFDEEARR | 3561 |
| | DR4w4 | DRBP*0401 | Preiss | non-natural (717.01) | YARFQSQTTLKQKT | 3562 |
| | DR4w10 | DRBP*0402 | YAR | non-natural (717.10) | YARFQRQTTLKAAA | 3563 |
| | DR4w14 | DRB1*0404 | BIN 40 | non-natural (717.01) | YARFQSQTTLKQKT | 3562 |
| | DR4w15 | DRB1*0405 | KT3 | non-natural (717.01) | YARFQSQTTLKQKT | 3562 |
| | DR7 | DRB1*0701 | Pitout | Tet. tox. 830-843 | QYIKANSKFIGITE | 3564 |
| | DR8 | DRB1*0802 | OLL | Tet. tox. 830-843 | QYIKANSKFIGITE | 3564 |
| | DR8 | DRB1*0803 | LUY | Tet. tox. 830-843 | QYIKANSKFIGITE | 3564 |
| | DR9 | DRB1*0901 | HID | Tet. tox. 830-843 | QYIKANSKFIGITE | 3564 |
| | DR11 | DRB1*1101 | Sweig | Tet. tox. 830-843 | QYIKANSKFIGITE | 3564 |
| | DR12 | DRB1*1201 | Herluf | unknown eluted peptide | EALIHQLKENPYVLS | 3565 |
| | DR13 | DRB1*1302 | H0301 | Tet. tox. 830-843 S->A | QYIKANAKFIGITE | 3566 |
| | DR51 | DRB5*0101 | GM3107 or | Tet. tox. 830-843 | QYIKANAKFIGITE | 3566 |
| | | | L416.3 | | | |
| | DR51 | DRB5*0201 | L255.1 | HA 307-3 19 | PKYVKQNTLKLAT | 3567 |
| | DR52 | DRB3*0101 | MAT | Tet. tox. 830-843 | NGQIGNDPNRDIL | 3568 |
| | DR53 | DRB4*0101 | L257.6 | non-natural (717.01) | YARFQSQTTLKQKT | 3569 |
| | DQ3.1 | QAI*0301/DQBI*03( | PF | non-natural (ROIV) | AHAAHAAHAAhAAHAA | 3570 |
| Mouse | IA^{b} | | DB27.4 | non-natural (ROW) | AHAAHAAHAAHAAHAA | 3570 |
| | IA^{d} | | A20 | non-natural (ROW) | AHAAHAAHAAHAAHAA | 3570 |
| | IA^{k} | | CH-12 | HEL46-61 | YNTDGSTDYGILQINSR | 3571 |
| | IA | | LS102.9 | non-natural (ROIV) | AHAAHAAHAAHAAHAA | 3570 |
| | IA | | 91.7 | non-natural (ROIV) | AHAAHAAHAAHAAHAA | 3570 |
| | IE^{d} | | A20 | Lambda repressor 12-26 | YLEDARRKKAIYEKKK | 3572 |
| | IE^{k} | | CH-12 | Lambda repressor 12-26 | YLEDARRXKAIYEKKK | 3572 |

[0444] TABLE XXV
Monoclonal antibodies used in MHC purifi

| Monoclonal antibody | Specificity |
|---|---|
| W6/32 | HLA-class I |
| B123.2 | HLA-B and C |
| IVD12 | HLA-DQ |
| LB3.1 | HLA-DR |
| M1/42 | H-2 class I |
| 28-14-8S | H-2 D^{b} and L^{d} |
| 34-5-8S | H-2 D^{d} |
| B8-24-3 | H-2 K^{b} |
| SF1-1.1.1 | H-2 K^{d} |
| Y-3 | H-2 K^{b} |
| 10.3.6 | H-2 IA^{k} |
| 14.4.4 | H-2 IE^{d}, IE^{K} |
| MKD6 | H-2 IA^{d} |
| Y3JP | H-2 IA^{b}, IA^{s}, IA^{u} |

[0445] TABLE XXVI

in vitro binding of conserved HBV-derived peptides to
HLA-A2-supertype alleles.

| | |
|---|---|
| A2-supertype | |
| binding capacity (IC50 nM) | Alleles |

| | | | | | | | | | | | | |
|---|---|---|---|---|---|---|---|---|---|---|---|---|
| Peptide | AA | Molecule | 1st Pos | Sequence | SEQ ID NO: | Consv.¹ | A*0201 | A*0202 | A*0203 | A*0206 | A*6802 | bound² |

| | | | | | | | | | | | | |
|---|---|---|---|---|---|---|---|---|---|---|---|---|
| 924.07 | 10 | Core | 18 | FLPSDFFPSV | 3492 | 95 | 2.5 | 2.1 | 6.0 | 3.0 | 36 | 5 |
| 1069.06 | 10 | ENV | 349 | LLVPFVQWFV | 3493 | 95 | 7.5 | 11 | 5.9 | 13 | 286 | 5 |
| 1147.13 | 10 | POL | 524 | FLLAQFTSA | 3494 | 95 | 24 | 134 | 1.4 | 34 | 455 | 5 |
| 1013.0102 | 9 | ENV | 346 | WLSLLVPFV | 3498 | 100 | 4.6 | 113 | 1.4 | 10 | 1290 | 4 |
| 777.03 | 9 | ENV | 183 | FLLTRILTI | 3496 | 80 | 9.8 | 100 | 1.3 | 19 | —³ | 4 |
| 927.15 | 9 | POL | 653 | ALMPLYACI | 3497 | 95 | 10 | 126 | 3.0 | 160 | 851 | 4 |
| 1069.05 | 9 | POL | 525 | LLAQFTSAI | 3499 | 95 | 50 | 16 | 3.0 | 1538 | 51 | 4 |
| 1132.01 | 9 | ENV | 350 | LVPFVQWFV | 3500 | 95 | 119 | 287 | 2083 | 463 | 14 | 4 |
| 1147.14 | 11 | ENV | 259 | VLLDYQGMLPV | 3501 | 90 | 8.6 | 20 | 2.0 | 13 | 2353 | 4 |
| 1090.77 | 9 | POL | 538(a) | YMDDVVLGV | 3495 | 90 | 5.1 | 90 | 6.7 | 71 | 1905 | 4 |
| 1069.073 | 9 | POL | 524 | FLLAQFTSA | 3505 | 95 | 6.0 | 1654 | 9.1 | 39 | 870 | 3 |
| 927.46 | 9 | POL | 500 | KLHLYSHPI | 3504 | 95 | 72 | 126 | 3.7 | 627 | 26667 | 3 |
| 927.42 | 9 | POL | 422 | NLSWLSLDV | 3503 | 90 | 77 | 843 | 16 | 2313 | 404 | 3 |
| 1168.02 | 9 | POL | 455 | GLSRYVARL | 3506 | 90 | 79 | 391 | 18 | 12333 | — | 3 |
| 927.41 | 9 | POL | 418 | LLSSNLSWL | 3502 | 90 | 455 | 55 | 2.6 | 1370 | 4000 | 3 |
| 1039.031 | 9 | ENV | 360 | MMWYWGPSL | 3509 | 85 | 5.6 | 5375 | 833 | 112 | 3636 | 2 |
| 927.11 | 9 | POL | 573 | FLLSLGIHL | 3507 | 95 | 7.7 | 4300 | 1000 | 34 | 11429 | 2 |
| 1142.07 | 9 | ENV | 73 | GLLGWSPQA | 3512 | 85 | 13 | 14333 | 286 | 1429 | — | 2 |
| 927.47 | 9 | POL | 502 | HLYSHPIIL | 3508 | 80 | 23 | 14333 | 11 | 2176 | 755 | 2 |
| 1137.02 | 10 | ENV | 271 | LLDYQGMLPV | 3511 | 90 | 51 | — | 500 | 552 | — | 2 |
| 1069.09 | 9 | ENV | 270 | VLLDYQGML | 3573 | 95 | 1144 | — | 476 | 4111 | - | 2 |
| 1069.14 | 10 | NUC | 168 | ILSTLPETTV | 3574 | 100 | 238 | 506 | 130 | 1194 | 5970 | 2 |
| 1069.11 | 10 | POL | 147 | YLHTLWKAGI | 3575 | 100 | 313 | 8600 | 18 | 4000 | 1250 | 2 |
| 1142.01 | 9 | NUC | 129 | LLWFHISCL | 3576 | 90 | 385 | 21500 | 238 | 1194 | 4082 | 2 |
| 1090.12 | 9 | NUC | 147 | YLVSFGVWI | 3538 | 90 | 13 | | | | | 1 |
| 1.0538 | 10 | ENV | 359 | GLSPTVWLSV | 3519 | 75 | 18 | | | | | 1 |
| 1013.1402 | 9 | ENV | 177 | VLQAGFFLL | 3514 | 95 | 33 | 2389 | 3704 | 1947 | 6349 | 1 |
| 1069.13 | 9 | ENV | 388 | PLLPIFFCL | 3516 | 100 | 77 | — | 5556 | 3364 | 8511 | 1 |
| 1069.10 | 10 | ENV | 389 | LLPIFFCLWV | 3515 | 100 | 156 | 5375 | 667 | 5000 | — | 1 |
| 1090.06 | 10 | ENV | 175 | LLVLQAGFFL | 3517 | 90 | 161 | 1162 | 2222 | 2467 | 3636 | 1 |
| 1.0895 | 10 | ENV | 248 | FILLLCLIFL | 3577 | 80 | 179 | | | | | 1 |
| 927.24 | 9 | POL | 770 | WILRGTSFV | 3578 | 80 | 185 | | | | | 1 |
| 1090.14 | 9 | POL | 538 | YMDDVVLGA | 3520 | 90 | 200 | — | 4167 | — | — | 1 |
| 3.0205 | 10 | ENV | 171 | FLGPLLVLQA | 3579 | 75 | 263 | | | | | 1 |
| 1069.08 | 10 | ENV | 260 | ILLLCLIFLL | 3580 | 100 | 263 | — | — | 2846 | 26667 | 1 |
| 1.0573 | 10 | POL | 773 | ILRGTSFVYV | 3581 | 80 | 313 | | | | | 1 |

¹Frequency of entire sequence amongst isolales scanned.
²Number of supertpe alleles bound. Peptides binding 3 or more alleles are considered degenerate.
³A dash (—) indicates IC50

[0446] TABLE XXVII

in vitro binding of conserved HBV-derived peptides to
HLA-A3-supertype alleles.

| | |
|---|---|
| A3-supertype | |
| binding capacity (IC50 nM) | Alleles |

| | | | | | | | | | | | | |
|---|---|---|---|---|---|---|---|---|---|---|---|---|
| Peptide | AA | Molecule | 1st Pos | Sequence | SEQ ID NO: | Consv.¹ | A*03 | A*11 | A*3101 | A*3301 | A*6801 | bound |

| | | | | | | | | | | | | |
|---|---|---|---|---|---|---|---|---|---|---|---|---|
| 26.0535 | 11 | X NUC FUS | 299 | GVWIRTPPAYR | 3582 | 95 | 58 | 35 | 3.0 | 40 | 12 | 5 |
| 1147.16 | 11 | pol | 149 | HTLWKAGILYK | 3583 | 100 | 20 | 14 | 486 | 403 | 42 | 5 |
| 26.0539 | 11 | POL | 376 | RLVVDFSQFSR | 3584 | 95 | 39 | 2.0 | 7.0 | 24 | 1.0 | 5 |
| 26.0149 | 9 | X | 69 | CALRFTSAR | 3585 | 85 | 3235 | 261 | 12 | 3.6 | 11 | 4 |
| 1.0993 | 9 | X | 130 | KVFVLGGCR | 3586 | 75 | 262 | 73 | 30 | 408 | 2667 | 4 |
| 26.0153 | 9 | X | 64 | SSAGPCALR | 3587 | 90 | 1375 | 43 | 55 | 181 | 11 | 4 |
| 1083.01 | 11 | Core | 141 | STLPETTVVRR | 3588 | 95 | 733 | 4.0 | 180 | 181 | 26 | 4 |
| 20.0130 | 9 | pol | 655 | AFTFSPTYK | 3589 | 95 | 42 | 150 | 3103 | 13182 | 296 | 3 |
| 26.0008 | 8 | POL | 656 | FTFSPTYK | 3590 | 95 | 193 | 136 | 1286 | 1000 | 73 | 3 |
| 1.0219 | 9 | X | 1550 | FVLGGCRHK | 3591 | 80 | 169 | 316 | 1500 | 744 | 103 | 3 |
| 1069.20 | 10 | POL | 388 | LVVDFSQFSR | 3592 | 100 | 6875 | 17 | 692 | 126 | 16 | 3 |
| 1069.16 | 9 | POL | 47 | NVSIPWTHK | 3593 | 100 | 134 | 105 | —³ | 2900 | 250 | 3 |
| 1090.10 | 10 | POL | 665 | QAFTFSPTYK | 3594 | 95 | 244 | 11 | 18000 | 5088 | 6.7 | 3 |
| 1090.11 | 9 | POL | 531 | SAICSVVRR | 3595 | 95 | 1897 | 29 | 1200 | 446 | 21 | 3 |
| 20.0131 | 9 | pol | 524 | SVVRRAFPH | 3596 | 95 | 100 | 10 | 621 | — | 500 | 3 |
| 26.0545 | 11 | X NUC FUS | 318 | TLPETTVVRRR | 3597 | 95 | 22000 | 375 | 2951 | 408 | 13 | 3 |
| 26.0023 | 8 | X NUC FUS | 296 | VSFGVWIR | 3598 | 90 | 2750 | 207 | 240 | 1074 | 222 | 3 |
| 1142.05 | 9 | POL | 55 | KVGNFTGLY | 3599 | 95 | 52 | 353 | — | — | — | 2 |
| 1142.06 | 9 | POL | 623 | PVNRPIDWK | 3600 | 85 | 355 | 43 | — | — | 8889 | 2 |
| 1.0975 | 9 | POL | 106 | RLKLIMPAR | 3601 | 75 | 116 | — | 5.8 | 592 | — | 2 |
| 1.0562 | 10 | POL | 576 | SLGIHLNPNK | 3602 | 75 | 55 | 77 | | | | 2 |
| 1069.21 | 10 | NUC | 170 | STLPETTVVR | 3603 | 95 | 15714 | 100 | 2250 | 1208 | 320 | 2 |
| 1069.22 | 10 | NUC | 171 | TLPETTVVRR | 3604 | 95 | 15714 | 261 | — | 2417 | 182 | 2 |
| 1069.15 | 10 | POL | 150 | TLWKAGILYK | 3605 | 100 | 2.1 | 17 | 3529 | 29000 | 615 | 2 |
| 1.0215. | 9 | X | 105 | TTDLEAYFK | 3606 | 75 | 18333 | 6.5 | — | 24167 | 471 | 2 |
| 1069.17 | 10 | POL | 369 | VTGGVFLVDK | 3607 | 100 | 282 | 65 | — | — | 3636 | 2 |
| 1069.19 | 9 | POL | 389 | VVDFSQFSR | 3608 | 100 | 7333 | 80 | 13846 | 1706 | 242 | 2 |
| 26.0026 | 8 | POL | 168 | ASFCGSPY | 3609 | 100 | 239 | 26 | — | — | 20000 | 2 |
| 26.0549 | 11 | ENV | 389 | LLPIFFCLWVY | 3610 | 100 | 478 | 10000 | 2609 | 644 | 82 | 2 |
| 26.0550 | 11 | POL | 528 | RAFPHCLAFSY | 3611 | 95 | 92 | 15 | 667 | 26364 | 2667 | 2 |
| 1090.04 | 10 | POL | 746 | GTDNSVVLSR | 3612 | 90 | 11000 | 143 | 6000 | 15263 | 10000 | 1 |
| 1069.04 | 10 | POL | 149 | HTLWICAGILY | 3613 | 100 | 250 | 7500 | — | 8529 | 6667 | 1 |
| 1.0205 | 9 | POL | 771 | ILRGTSFVY | 3614 | 80 | 250 | — | — | — | — | 1 |
| 1090.08 | 9 | NUC | 148 | LYSFGVWIR | 3615 | 90 | 3929 | 500 | | | | 1 |
| 1039.01 | 10 | ENV | 360 | MMWYWGPSLY | 3616 | 85 | 220 | 7500 | — | — | 26667 | 1 |
| 1.0584 | 10 | X | 104 | STTDLEAYFK | 3617 | 75 | 1667 2.2 | | | | 1 | |
| 1147.17 | 11 | pol | 735 | GTDNSVVLSRK | 3618 | 90 | 786 | 11 | — | — | — | 1 |
| 1147.18 | 11 | pol | 357 | RVTGGVFLVDK | 3619 | 100 | 578 | 207 | — | — | — | 1 |
| 1099.03 | 9 | POL | 150 | TLWKAGILY | 3620 | 100 | 85 | 7500 | — | — | — | 1 |
| 3090.15 | 10 | POL | 549 | YMDDVVLGAK | 3621 | 90 | 333 | 1395 | — | — | — | 1 |
| 26.0024 | 8 | POL | 50 | VSIPWTHK | 3622 | 100 | 846 | 353 | 5806 | 22308 | 20000 | 1 |

¹Frequency of entire sequence amongst isolates scanned.
2. Number of supeelpe alleles bound. Peptides binding 3 or more alleles are considered degenerate.
³A dash (—) indicates IC50

[0447] TABLE XXVIII

in vitro binding of conserved HBV-derived peptides to
HLA-B7 supertype alleles.

| | |
|---|---|
| B7-supertype binding capacity (IC50 nM) | Alleles |

| | | | | | | | | | | | | |
|---|---|---|---|---|---|---|---|---|---|---|---|---|
| Peptide | AA | Molecule | 1st Pos | Sequence | SEQ ID NO: | Consv.¹ | B*0702 | B*3501 | B*5101 | B*5301 | B*5401 | bound² |

| | | | | | | | | | | | | |
|---|---|---|---|---|---|---|---|---|---|---|---|---|
| 1147.05 | 10 | POL | 541 | FPHCLAFSYM | 3623 | 95 | 56 | 33 | 61 | 118 | 208 | 5 |
| 1145.04 | 9 | ENV | 324 | IPIPSSWAF | 3624 | 100 | 42 | 2.6 | 2.3 | 12 | 2941 | 4 |
| 1147.02 | 9 | POL | 440 | HPAAMPHLL | 3625 | 100 | 56 | 267 | 500 | 186 | 833 | 4 |
| 1147.06 | 9 | X | 58 | LPVCAFSSA | 3626 | 95 | 115 | 101 | 500 | 10333 | 0.53 | 4 |
| 1147.08 | 9 | POL | 651 | YPALMPLYA | 3627 | 95 | 306 | 150 | 162 | 664 | 0.63 | 4 |
| 988.05 | 9 | CORE | 19 | LPSDFFPSV | 3628 | 95 | 1774 | 343 | 9.0 | 120 | 4.8 | 4 |
| 1145.08 | 9 | POL | 541 | FPHCLAFSY | 3629 | 95 | —³ | 14 | 83 | 17 | 503 | 3 |
| 19.0014 | 8 | POL | 640 | YPALMPLY | 3630 | 190 | 13750 | 28 | 13 | 207 | 1786 | 3 |
| 26.0570 | 11 | pol | 640 | YPALMPLYACI | 3631 | 95 | 1375 | — | 117 | 291 | 143 | 3 |
| 1147.04 | 10 | POL | 365 | TPARVTGGVF | 3632 | 90 | 17 | 72 | 939 | 16667 | 2 | |
| 15.0034 | 9 | ENV | 390 | LPIFFCLWV | 3633 | 100 | — | — | 57 | 2325 | 53 | 2 |
| 20.0140 | 9 | POL | 723 | LPIHTAELL | 3634 | 85 | 1375 | 114 | 1058 | 30 | 20000 | 2 |
| 19.0006 | 8 | ENV | 340 | VPFVQWFV | 3635 | 95 | 5500 | — | 0.29 | 91 | 2 | |
| 19.0007 | 8 | ENV | 379 | LPIFFCLW | 3636 | 100 | — | — | 153 | 66 | 2857 | 2 |
| 19.0010 | 8 | POL | 1 | MPLSYQHF | 3637 | 100 | — | 742 | 458 | 251 | 526 | 2 |
| 19.0011 | 8 | POL | 429 | HPAAMPHL | 3638 | 100 | 85 | 18000 | 18 | 2514 | 625 | 2 |
| 19.0012 | 8 | POL | 511 | SPFLLAQF | 3639 | 95 | 10 | 8000 | 306 | 10333 | 1075 | 2 |
| 26.0566 | 11 | poL | 511 | SPFLLAQFTSA | 3640 | 95 | 67 | — | — | — | 0.83 | 2 |
| 1147.01 | 9 | POL | 789 | DPSRGRLGL | 3641 | 90 | 458 | — | — | — | — | 1 |
| 16.0182 | 10 | X | 67 | GPCALRFTSA | 3642 | 90 | 61 | — | — | — | 2857 | |
| 20.0273 | 10 | POL | 440 | HPAAMPHLLV | 3643 | 85 | 344 | 3600 | 705 | 664 | 588 | 1 |
| 15.0030 | 9 | ENV | 191 | IPQSLDSWW | 3644 | 90 | — | — | 27500 | 62 | — | 1 |
| 15.0210 | 10 | POL | 123 | LPLDKGIKPY | 3645 | 100 | — | 248 | 27500 | — | — | 1 |
| 16.0006 | 9 | ENV | 25 | FPDHQLDPA | 3646 | 90 | — | 8000 | — | — | 12 | 1 |
| 16.0177 | 10 | ENV | 324 | IPIPSSWAFA | 3647 | 80 | 4231 | 3000 | 6643 | | 22 | 1 |
| 16.0180 | 10 | POL | 644 | APFTQCGYPA | 3648 | 95 | 1897 | — | | — | 7.1 | 1 |
| 16.0181 | 10 | POL | 723 | LPIHTAELLA | 3649 | 85 | 3056 | 6545 | | 5813 | 30 | 1 |
| 19.0003 | 8 | ENV | 173 | OPLLVLQA | 3650 | 95 | 18333 | — | 500 | — | 1538 | 1 |
| 19.0005 | 8 | ENV | 313 | IPIPSSWA | 3651 | 100 | 13750 | 18000 | 2895 | — | 167 | 1 |
| 19.0009 | 8 | NUC | 133 | RPPNAPIL | 3652 | 100 | 724 | — | 196 | — | — | 1 |
| 19.0015 | 8 | POL | 659 | SPTYKAFL | 3653 | 95 | 14 | — | 2895 | — | — | 1 |
| 19.0016 | 8 | POL | 769 | VPSALNPA | 3654 | 90 | 5000 | — | 786 | — | 10 | 1 |
| 26.0554 | 11 | pol | 633 | APFTQCGYPAL | 3655 | 95 | 24 | 7200 | 13750 | — | 1075 | 1 |
| 26.0359 | 11 | pol | 712 | LPIHTAELLAA | 3656 | 85 | 611 | 2667 | — | 775 | 3.6 | 1 |
| 26.0561 | 11 | pol | 774 | NPADDPSRGRL | 3657 | 90 | 458 | — | — | — | — | 1 |
| 26.0564 | 11 | Core | 133 | RPPNAPILSTL | 3658 | 100 | 42 | — | 3056 | — | — | 1 |
| 26.0567 | 11 | Core | 49 | SPHHTALRQAI | 3659 | 100 | 9.5 | — | 13750 | 18600 | — | 1 |
| 26.0568 | 11 | pol | 354 | TPARVTGGVFL | 3660 | 90 | 58 | — | — | 18600 | 20000 | 1 |

¹Frequency of entire sequence amongst isolates scanned.
²Number of supertype alleles bound. Peptides binding 3 or more alleles are considered degenerate.
A dash (—) indicates IC50

[0448] TABLE XXIX

HBV derived A1- and A24- motif containing peptides

| | | | | | | |
|---|---|---|---|---|---|---|
| | | | | | | HLA-A*0101 |
| Peptide | Molecule | Position | Sequence | SEQ ID NO: | Conserv. | binding (IC50 nM) |

a. A1-motif peptides

| | | | | | | |
|---|---|---|---|---|---|---|
| 1069.01 | Core | 59 | LLDTASALY | 3661 | 75 | 2.1 |
| 1.0519 | Core | 419 | DLLDTASALY | 3662 | 75 | 2.3 |
| 1069.02 | pol | 427 | SLDVSAAFY | 3663 | 95 | 4.8 |
| 2.0239 | | 1000 | LSLDVSAAFY | 3664 | 95 | 6.0 |
| 2.0126 | | 1521 | MSTTDLEAY | 3665 | 75 | 29 |
| 1039.06 | ENV | 359 | WMMWYWGPSLY | 3666 | 85 | 78 |
| 1090.14 | pol | 538 | YMDDVVLGA | 3667 | 90 | 96 |
| 1090.09 | pol | 808 | PTTGRTSLY | 3668 | 85 | 119 |
| 1069.03 | pol | 124 | PLDKGIKPYY | 3669 | 100 | 147 |
| 1069.08 | env | 249 | ILLLCLIFLL | 3670 | 100 | 192 |
| 1069.04 | pol | 149 | HTLWKAGILY | 3671 | 100 | 381 |
| 1039.01 | | 360 | MMWYWGPSLY | 3672 | 85 | 309 |
| 1.0774 | Core | 416 | WLWGMDIDPY | 3673 | 75 | 309 |
| 20.0254 | pol | 631 | FAAPFTQCGY | 3674 | 95 | 368 |
| 1.0166 | pol | 629 | KVGNFTGLY | 3675 | 95 | 368 |

| | | | | | | |
|---|---|---|---|---|---|---|
| | | | | | | HLA-A*2402 |
| Peptide | Molecule | Position | Sequence | SEQ ID NO: | Conserv. | binding (IC50 nM) |

b. A24- motif peptides

| | | | | | | |
|---|---|---|---|---|---|---|
| 20.0271 | POL | 392 | SWPKFAVPNL | 3676 | 95 | 2.1 |
| 1069.23 | POL | 745 | KYTSFPWLL | 3677 | 85 | 2.3 |
| 2.0181 | POL | 492 | LYSHPIILGF | 3678 | 80 | 11 |
| 20.0269 | ENV | 236 | RWMCLRRFII | 3679 | 95 | 11 |
| 20.0136 | ENV | 334 | SWLSLLVPF | 3680 | 100 | 31 |
| 20.0137 | ENV | 197 | SWWTSLNFL | 3681 | 95 | 32 |
| 20.0135 | ENV | 236 | RWMCLRRFI | 3682 | 95 | 169 |
| 20.0139 | POL | 167 | SFCGSPYSW | 3683 | 100 | 169 |
| 2.0173 | POL | 4 | SYQHFRKLLL | 3684 | 75 | 182 |
| 2.0060 | | 1224 | GYPALMPLY | 3685 | 95 | 245 |
| 13.0129 | NUC | 117 | EYLVSFGVWI | 3686 | 90 | 353 |
| 1090.02 | core | 131 | AYRPPNAPI | 3687 | 90 | 387 |
| 13.0073 | NUC | 102 | WFHISCLTF | 3688 | 80 | 400 |
| 20.0138 | POL | 51 | PWTHKVGNF | 3689 | 100 | 414 |

A dash indicates IC50 nM

[0449] TABLE XXXa

Immunogenicity of HBV-derived A2-supermotif cross-reactive peptides

Immunogenicity

| | | | | | | | | |
|---|---|---|---|---|---|---|---|---|
| Peptide | Sequence | SEQ ID NO: | Protein | XRN | primary | transgenic | patients | overall¹ |

| | | | | | | | | |
|---|---|---|---|---|---|---|---|---|
| 924.07 | FLPSDPFPSV | 3690 | HBV core 18 | 5 | 10/10 | 6/6 | 25/32^{a} | + |
| 1069.06 | LLVPFVQWFV | 3691 | HBV env 338 | 5 | 3/4 | 6/9 | | + |
| 1147.13 | FLLAQFTSAI | 3692 | HBV pol 513 | 5 | | 0/3 | | − |
| 1090.77 | YMDDVVLGV | 3693 | HBV pol 538 | 5 | | 9/9 | | + |
| 777.03 | FLLTRILTI | 3694 | HBV env 183 | 4 | | | 14/23^{a} | + |
| 927.15 | ALMPLYACI | 3695 | HBV pol 642 | 4 | 10/12 | 3/5 | 2/15^{a} | + |
| 1013.01 | WLSLLVPFV | 3696 | HBV env 335 | 4 | 2/6 | 5/9 | 23/29^{a} | + |
| 1069.05 | LLAQFTSAI | 3697 | HBV pol 504 | 4 | 0/4 | 0/5 | | − |
| 1132.01 | LVPFVQWFV | 3698 | HBV env 339 | 4 | 0/3 | 0/4 | | − |
| 1147.14 | VLLDYQGMLPV | 3699 | HBV env 259 | 4 | 4/4 | 6/6 | | + |
| 927.41 | LLSSNLSWL | 3700 | HBV pol 992 | 3 | 0/4 | 0/3 | | − |
| 927.42 | NLSWLSLDV | 3701 | HBV pol 411 | 3 | | 2/8 | | + |
| 927.46 | KLHLYSHPI | 3702 | HBV pol 489 | 3 | 0/4 | 4/6 | | + |
| 1069.07 | FLLAQFTSA | 3703 | HBV pol 503 | 3 | 1/2 | 0/3 | | + |
| 1168.02 | GLSRYVARL | 3704 | HBV pol 455 | 3 | | | 9/13^{a} | + |

Immunogenicity evaluation derived from primary cultures, acute patients (a-Bertoni et al, J Clin Invest 100:503, b-Rehermann et al., J. Clin. Invest 97:1655, c-Nayersina et al., J Immunol 150:4659) or transgenic mice. A positive assessment (+) is assigned when responders have been noted in one of these systems.

[0450] TABLE XXXb

Immunogenicity of non-crossreactive HBV A2-supermotif peptides

Immunogenicity

| | | | | | | | | |
|---|---|---|---|---|---|---|---|---|
| Peptide | Sequence | SEQ ID NO: | Protein | XRN | primary | transgenic | patients | overall¹ |

| | | | | | | | | |
|---|---|---|---|---|---|---|---|---|
| 927.11 | FLLSLGIHL | 3705 | HBV pol 562 | 2 | 15/22 | 12/13 | 9/15^{a} | + |
| 927.47 | HLYSHPIIL | 3706 | HBV pol 1076 | 2 | | 10/14 | | + |
| 1039.03 | MMWYWGPSL | 3707 | HBV env 360 | 2 | 3/4 | 0/4 | | + |
| 1069.12 | YLHTLWKAGV | 3708 | HBV pol 147 | 2 | 2/4 | | | + |
| 1137.02 | LLDYQGMLPV | 3709 | HBV env 260 | 2 | 1/2 | 0/4 | | + |
| 1142.07 | GLLGWSPQA | 3710 | HBV env 62 | 2 | 3/4 | 5/6 | | + |
| 1.0573 | ILRGTSFVYV | 3711 | HBV pol 773 | 1 | | | 3/7^{b} | + |
| 1013.14 | VLQAGFFLL | 3712 | HBV env 177 | 1 | 0/4 | 5/12 | | + |
| 1069.10 | LLPIFFCLWV | 3713 | HBV env 378 | 1 | 3/3 | 0/4 | 2/5^{c} | + |
| 1069.13 | PLLPIFFCL | 3714 | HBV env 377 | 1 | 0/4 | 7/12 | | + |
| 1090.06 | LLVLQAGFFL | 3715 | HBV env 175 | 1 | 1/5 | 0/4 | | + |
| 1090.12 | YLVSFGVWI | 3716 | HBV nuc 118 | 1 | 9/9 | | | + |
| 1.0518 | GLSPTVWLSV | 3717 | HBV env 338 | 1 | | | 3/9^{c} | + |
| 1090.14 | YMDDVVLGA | 3718 | HBV pol 538 | 1 | 2/7 | 2/5 | 2/7^{b} | + |

Immunogenicity evaluation derived from primary cultures, acute patients (a-Bertoni et al, J Clin Invest 100:503, b-Rehermann et al., J. Clin. Invest 97:1655, c-Nayersina et al., J Immunol 150:4659) or transgenic mice. A positive assessment (+) is assigned when responders have been noted in one of these systems.

[0451] TABLE XXXc
Cross-recognition of HBV pol 538 and a Lamivudine induced
pol 538 variant by CTL induced with a pol 538 analog^{a}.

| | Day 6 CTL response (ΔLU) | |
|---|---|---|
| | HBV pol 538 | HBV pol 538 mutant |
| Stimulating peptide | (YMDDVVLGA)^{b} | (YVDDVVLGA) |
| HBV pol 538 | 27.8 | 54.2 |
| HBV pol 538 mutant | 35.3 | 27.9 |

^{a}CTLs were induced using the 1090.77 analog of HBV pol 538 (peptide 1090.14). 1090.77 was encoded in the DNA minigene pEP2.AOS.
^{b}Values shown represent the geometric mean of ΔLU from 2 independent cultures. Peptides loaded onto target cells were 1090.14 (HBV pol 538) or 1353.02 (a Lamivudine induced mutant of pol 538).

[0452] TABLE XXXIa

Immunogenicity of HBV-derived A3-supermotif cross-reactive peptides

Immunogenicity

| | | | | | | | | |
|---|---|---|---|---|---|---|---|---|
| Peptide | Sequence | SEQ ID NO: | Protein | XRN | primary | transgenic | patients | overall¹ |

| | | | | | | | | |
|---|---|---|---|---|---|---|---|---|
| 1147.16 | HTLWKAGILYK | 3719 | HBV POL 149 | 5 | 0/6 | 3/3 | 1/22 | + |
| 1083.01 | STLPETTVVRR | 3720 | HBV core 141 | 4 | 3/5 | 6/6 | 8/32 | + |
| 1150.51 | GSTHVSWPK | 3721 | HBV pol 398 | 4 | | 3/6 | | + |
| 1.0219 | FVLGGCRHK | 3722 | HBV adr “X” 1550 | 3 | 0/4 | | | − |
| 1069.16 | NVSIPWTHK | 3723 | HBV pol 47 | 3 | 0/8 | 0/3 | 1/21 | + |
| 1069.20 | LVVDFSQFSR | 3724 | HBV pol 388 | 3 | 0/4 | 6/6 | 1/22 | + |
| 1090.10 | QAFTFSPTYK | 3725 | HBV pol 665 | 3 | 3/6 | 0/3 | 3/21 | + |
| 1090.11 | SAICSVVRR | 3726 | HBV pol 531 | 3 | 1/4 | | 2/22 | + |

¹Immunogenicity evaluation derived from primary cultures, Bertoni et al, J Clin Invest 100:503 or transgenic mice. A positive assessment (+) is assigned when responders have been noted in one of these systems. A negative assessment (−) indicates that no responders when examined.

[0453] TABLE XXXIb

Immunogenicity of non-crossreactive HBV A3-supermotif peptides

Immunogenicity

| | | | | | | | | |
|---|---|---|---|---|---|---|---|---|
| Peptide | Sequence | SEQ ID NO: | Protein | XRN | primary | transgenic | patients | overall¹ |

| | | | | | | | | |
|---|---|---|---|---|---|---|---|---|
| 1069.15 | TLWKAGILYK | 3727 | HBV pol 150 | 2 | 3/8 | 0/3 | 5/28 | + |
| 1142.05 | KVGNFTGLY | 3728 | HBV adr POL 629 | 2 | | 0/3 | 2/22 | + |

¹Immunogenicity evaluation derived from primary cultures, Bertoni et al, J Clin Invest 100:503 or transgenic mice. A positive assessment (+) is assigned when responders have been noted in one of these systems. A negative assessment (−) indicates that no responders when examined.

[0454] TABLE XXXIIa

Immunogenicity of HBV B7-supermotif cross-reactive peptides

Immunogenicity

| | | | | | | | | |
|---|---|---|---|---|---|---|---|---|
| Peptide | Sequence | SEQ ID NO: | Protein | XRN | primary | transgenic | patients | overall¹ |

| | | | | | | | |
|---|---|---|---|---|---|---|---|
| 1147.05 | FPHCLAFSYM | 3729 | KBV POL 530 | 5 | 1/3 | 0/12 | + |
| 988.05 | LPSDFFPSV | 3730 | HBV core 19-27 | 4 | | 2/16 | + |
| 1145.04 | IPIPSSWAF | 3731 | HBV ENV 313 | 4 | 0/4 | 1/12 | + |
| 1147.02 | HPAAMPHLL | 3732 | HBV POL 429 | 4 | 0/5 | 0/12 | - |
| 1147.06 | LPVCAFSSA | 3733 | HBV X 58 | 4 | 1/4 | | + |
| 1147.08 | YPALMPLYA | 3734 | HBV POL 640 | 4 | | 0/12 | - |
| 1145.08 | FPHCLAFSY | 3735 | HBV POL 541 | 3 | 0/4 | | − |

¹Immunogenicity evaluation derived from primary cultures, Bertoni et al, J Clin Invest 100:503 or transgenic mice. A positive assessment (+) is assigned when responders have been noted in one of these systems. A negative assessment (−) indicates that no responders when examined.

[0455] TABLE XXXIIb:

Immunogenicity of non-crossreactive HBV B7-supermotif peptides

Immunogenicity

| | | | | | | | | |
|---|---|---|---|---|---|---|---|---|
| Peptide | Sequence | SEQ ID NO: | Protein | XRN | primary | transgenic | patients | overall¹ |

| | | | | | | |
|---|---|---|---|---|---|---|
| 1147.04 | TPARVTGGVF | 3736 | HBV POL 354 | 2 | 2/12 | + |

¹Immunogenicity evaluation derived from primary cultures, Bertoni et al, J Clin Invest 100:503 or transgenic mice. A positive assessment (+) is assigned when responders have been noted in one of these systems. A negative assessment (−) indicates that no responders when examined.

[0456] TABLE XXXIII

Candidate HBV-derived HTL epitopes

| | |
|---|---|
| Selection | Conservancy |

| | | | | | | | |
|---|---|---|---|---|---|---|---|
| criteria | Peptide | Mol | 1st Pos | Core | Total | Sequence | SEQ ID NO: |

| | | | | | | | |
|---|---|---|---|---|---|---|---|
| DR-supermotif | F107.01 | ENV | 249 | 100 | 95 | ILLLCLIFLLVLLDY | 3737 |
| | F107.02 | ENV | 252 | 95 | 95 | LCLIFLLVLLDYQGM | 3738 |
| | 1280.17 | ENV | 258 | 90 | 90 | LVLLDYQGMLPVCPL | 3739 |
| | 1186.22 | ENV | 332 | 100 | 100 | RFSWLSLLVPFVQWF | 3740 |
| | 1186.15 | ENV | 339 | 95 | 95 | LVPFVQWFVGLSPTV | 3741 |
| | 1186.06 | ENV | 342 | 95 | 95 | FVQWFVGLSPTVWLS | 3742 |
| | 1186.03 | NUC | 19 | 85 | 85 | ASKLCLGWLWGMDID | 3743 |
| | 1186.12 | NUC | 24 | 85 | 85 | LGWLWGMDIDPYKEF | 3744 |
| | 857.02 | NUC | 50 | | 90 | PHHTALRQAILCWGELMTLA | 3745 |
| | 1186.23 | NUC | 98 | 85 | 85 | RQLLWFHISCLTFGR | 3746 |
| | 27.0279 | NUC | 117 | | 90 | EYLVSFGVWIRTPPA | 3747 |
| | 27.0280 | NUC | 123 | 95 | 95 | GVWIRTPPAYRPPNA | 3748 |
| | 1186.20 | NUC | 129 | 100 | 95 | PPAYRPPNAPTLSTL | 3749 |
| | 1186.16 | NUC | 136 | 100 | 95 | NAPILSTLPETTVVR | 3750 |
| | 1186.01 | POL | 38 | 95 | 95 | AEDLNLGNLNVSIPW | 3751 |
| | 1186.17 | POL | 45 | 100 | 95 | NLNVSIPWTHKVGNF | 3752 |
| | 27.0281 | POL | 145 | 100 | 100 | RHYLHTLWKAGILYK | 3753 |
| | 1280.13 | POL | 406 | 95 | 95 | KFAVPNLQSLTNLLS | 3754 |
| | 27.0283 | POL | 409 | | 85 | VPNLQSLTNLLSSNL | 3755 |
| | F107.03 | POL | 412 | 90 | 90 | LQSLTNLLSSNLSWL | 3756 |
| | 1186.28 | POL | 416 | 90 | 90 | TNLLSSNLSWLSLDV | 3757 |
| | 1186.27 | POL | 420 | 100 | 85 | SSNLSWLSLDVSAAF | 3758 |
| | F107.04 | POL | 523 | 95 | 95 | PFLLAQFTSAICSVV | 3759 |
| | 1186.10 | POL | 526 | 95 | 95 | LAQFTSAICSVVRRA | 3760 |
| | 1186.04 | POL | 534 | 95 | 95 | CSVVRRAFPHCLAFS | 3761 |
| | F107.05 | POL | 538 | 95 | 95 | RRAFPHCLAFSYMDD | 3762 |
| | 1186.02 | POL | 546 | 90 | 90 | AFSYMDDVVLGAKSV | 3763 |
| | 1186.05 | POL | 629 | 85 | 85 | DWKVCQRIVGLLGFA | 3764 |
| | 1280.21 | POL | 637 | 95 | 95 | VGLLGFAAPFTQCGY | 3765 |
| | 27.0278 | POL | 643 | | 95 | AAPFTQCGYPALMPL | 3766 |
| | 1186.21 | POL | 648 | 95 | 95 | QCGYPALMPLYACIQ | 3767 |
| | 1280.14 | POL | 694 | 95 | 95 | LCQVFADATPTGWGL | 3768 |
| | 27.0282 | POL | 750 | 85 | 85 | SVVLSRKYTSFPWLL | 3769 |
| | | X | 13 | 95 | 90 | RDVLCLRPVGAESRG | 3770 |
| | 1186.07 | X | 50 | 95 | 90 | GAHLSLRGLPVCAFS | 3771 |
| | 1186.29 | X | 60 | 95 | 90 | VCAFSSAGPCALRFT | 3772 |
| Algorithm | 1280.20 | ENV | 330 | 100 | 80 | SVRFSWLSLLVPFVQ | 3773 |
| | 1280.19 | NUC | 28 | 85 | 80 | RDLLDTASALYREAL | 3774 |
| | 1298.02 | POL | 56 | 90 | 55 | VGNFTGLYSSTVPVF | 3775 |
| | 1298.03 | POL | 571 | 95 | 75 | TNFLLSLGIHLNPNK | 3776 |
| | 1298.05 | POL | 651 | 95 | 55 | YPALMPLYACIQSKQ | 3777 |
| | 1298.06 | POL | 664 | 95 | 60 | KQAFTFSPTYKAFLC | 3778 |
| | 1280.181 | POL | 722 | 85 | 80 | PLPIHTAELLAACFA | 3779 |
| | 1280.09 | POL | 774 | 90 | 80 | GTSFVYVPSALNPAD | 3780 |
| DR3-motif | 795.05 | ENV | 10 | | 95 | PLGFFPDHQLDP | 3781 |
| | 35.0090 | ENV | 312 | 95 | 90 | FLLVLLDYQGMLPVC | 3782 |
| | CF-03 | NUC | 28 | 85 | 80 | RDLLDTASALYREALESPEH | 3783 |
| | 35.0091 | POL | 18 | 90 | 65 | AGPLEEELPRLADEG | 3784 |
| | 35.0092 | POL | 34 | 100 | 85 | NRRVAEDLNLGNLNV | 3785 |
| | 35.0093 | POL | 96 | 85 | 60 | VGPLTVNEKRRLKLI | 3786 |
| | 35.0094 | POL | 120 | 100 | 100 | TKYLPLDKGIKPYYP | 3787 |
| | 35.0095 | POL | 371 | 100 | 55 | GGVFLVDKNPHNTTE | 3788 |
| | 35.0096 | POL | 385 | 100 | 45 | ESRLVVDFSQFSRGN | 3789 |
| | 1186.18 | POL | 422 | 95 | 85 | NLSWLSLDVSAAFYH | 3790 |
| | 35.0099 | POL | 666 | 95 | 55 | AFTFSPTYKAFLCKQ | 3791 |
| | 35.0101 | X | 18 | 95 | 35 | LRPVGAESRGRPVSG | 3792 |
| Lower | 799.01 | ENV | 11 | 80 | 75 | PLLVLQAGFFLLTRILTIPQ | 3793 |
| conservancy | 799.02 | ENV | 31 | 95 | | SLDSWWTSLNPLGGTTVCLG | 3794 |
| or miscellaneous 799.04 | ENV | 71 | 95 | 75 | GYRWMCLRRFIIFLFILLLC | 3795 | |
| | 1298.01 | ENV | 137 | 80 | 40 | PQAMQWNSTTFHQTL | 3796 |
| | 1280.06 | ENV | 180 | 80 | 80 | AGFFLLTRILTIPQS | 3797 |
| | 1280.11 | ENV | 245 | 80 | 80 | IFLFILLLCLIFLLV | 3798 |
| | CF-08 | NUC | 120 | | 90 | VSFGVWIRTPPAYRPPNAPI | 3799 |
| | 1186.25 | NUC | 121 | 95 | 90 | SFGVWIRTPPAYRPP | 3800 |
| | 1280.15 | POL | 501 | 80 | 80 | LHLYSHIPIIIGFRKI | 3803 |
| | 1298.04 | POL | 618 | 80 | 45 | KQCFRKLPVNRPIDW | 3802 |
| | 1298.07 | POL | 767 | 80 | 70 | AANWILRGTSFVYVP | 3803 |
| | 1298.08 | POL | 827 | 80 | 60 | PDRVHFASPLHVAWR | 3804 |

[0457] TABLE XXXIV
HLA-DR screening panels

| Screening | | | Representative Assay | | Phenotypic Frequencies | | | | | |
|---|---|---|---|---|---|---|---|---|---|---|
| Panel | Antigen | Alleles | Allele | Alias | Cauc. | Blk. | Jpn. | Chn. | Hisp. | Avg. |
| Primary | DR1 | DRB1*0101-03 | DRB1*0101 | (DR1) | 18.5 | 8.4 | 10.7 | 4.5 | 10.1 | 10.4 |
| | DR4 | DRB1*0401-12 | DRB1*0401 | (DR4w4) | 23.6 | 6.1 | 40.4 | 21.9 | 29.8 | 24.4 |
| | DR7 | DRB1*0701-02 | DRB1*0701 | (DR7) | 26.2 | 11.1 | 1.0 | 15.0 | 16.6 | 14.0 |
| | Panel total | | | | 59.6 | 24.5 | 49.3 | 38.7 | 51.1 | 44.6 |
| Secondary | DR2 | DRB1*1501-03 | DRB1*1501 | (DR2w2 β1) | 19.9 | 14.8 | 30.9 | 22.0 | 15.0 | 20.5 |
| | DR2 | DRB5*0101 | DRB5*0101 | (DR2w2 β2) | — | — | — | — | — | — |
| | DR9 | DRB1*09011, 09012 | DRB1*0901 | (DR9) | 3.6 | 4.7 | 24.5 | 19.9 | 6.7 | 11.9 |
| | DR13 | DRB1*1301-06 | DRB1*1302 | (DR6w19) | 21.7 | 16.5 | 14.6 | 12.2 | 10.5 | 15.1 |
| | Panel total | | | | 42.0 | 33.9 | 61.0 | 48.9 | 30.5 | 43.2 |
| Tertiary | DR4 | DRB1*0405 | DRB1*0405 | (DR4w15) | — | — | — | — | — | — |
| | DR8 | DRB1*0801-5 | DRB1*0802 | (DR8w2) | 5.5 | 10.9 | 25.0 | 10.7 | 23.3 | 15.1 |
| | DR11 | DRB1*1101-05 | DRB1*1101 | (DR5w11) | 17.0 | 18.0 | 4.9 | 19.4 | 18.1 | 15.5 |
| | Panel total | | | | 22.0 | 27.8 | 29.2 | 29.0 | 39.0 | 29.4 |
| Quarternary | DR3 | DRB1*0301-2 | DRB1*0301 | (DR3w17) | 17.7 | 19.5 | 0.4 | 7.3 | 14.4 | 11.9 |
| | DR12 | DRB1*1201-02 | DRB1*1201 | (DR5w12) | 2.8 | 5.5 | 13.1 | 17.6 | 5.7 | 8.9 |
| | Panel total | | | | 20.2 | 24.4 | 13.5 | 24.2 | 19.7 | 20.4 |

[0458] TABLE XXXV

HBV-derived cross-reactive HLA-DR binding peptides

| | |
|---|---|
| Conservancy | HLA-DR binding capacity (IC50 nM) |

| | | | | | | | | | | | | |
|---|---|---|---|---|---|---|---|---|---|---|---|---|
| Peptide | Mol | 1st Pos | Core | Total | Sequence | SEQ ID NO: | DR1 | DR2w2β1 | DR2w2β2 | DR3 | DR4w4 | DR4w15 |

| | | | | | | | | | | | | |
|---|---|---|---|---|---|---|---|---|---|---|---|---|
| F107.03 | POL | 412 | 90 | 90 | LQSLTNLLSSNLSWL | 3805 | 2.0 | 21 | 1000 | —^{a} | 9.4 | 47 |
| 1293.06 | POL | 664 | 95 | 60 | KQAFTFSPTYKAFLC | 3806 | 9.4 | 38 | 143 | — | 41 | 173 |
| 1280.06 | ENV | 180 | 80 | 80 | AGFFLLTRILTTPQS | 3807 | 1.1 | 217 | 1053 | — | 8.5 | 253 |
| 1280.09 | POL | 774 | 90 | 80 | GTSFVYVPSALNPAD | 3808 | 14 | 650 | 400 | — | 118 | 93 |
| 11186.25 | NUC | 121 | 95 | 90 | SFGVWIRTPPAYRPP | 3809 | 532 | 827 | 47 | — | 577 | 603 |
| 27.0280 | NUC | 123 | 95 | 95 | GVWIRTPPAYRPPNA | 3810 | 14 | 217 | 2.8 | — | 13 | 67 |
| CF-08 | NUC | 120 | | 90 | VSFGVWIRTPPAYRPPNAPI | 3811 | 192 | | 105 | | 300 | |
| 27.0281 | POL | 145 | 100 | 100 | RHYLHTLWKAGILYK | 3812 | 17 | 5.4 | 35 | — | 2250 | 1462 |
| 1186.15 | ENV | 339 | 95 | 95 | LVPFVQWFVGLSPTV | 3813 | 385 | 13 | 1429 | — | 300 | 27 |
| 1280.15 | POL | 501 | 80 | 80 | LHLYSHPIILGFRKI | 3814 | 227 | 268 | 500 | — | 66 | 238 |
| F107.04 | POL | 523 | 95 | 95 | PFLLAQFTSAICSVV | 3815 | 28 | 337 | 4762 | — | 563 | 317 |
| 1298.04 | POL | 618 | 80 | 45 | KQCFRKLPVNRPIDW | 3816 | 3.3 | 4136 | 952 | — | 38 | 45 |
| 1298.07 | POL | 767 | 80 | 70 | AANWILRGTSFVYVP | 3817 | 54 | 379 | 3279 | — | 882 | 1520 |
| 857.02 | NUC | 50 | | 90 | PHHTALRQAILCWGELMTLA | 3818 | 70 | 9.1 | 211 | — | 85 | |

| | |
|---|---|
| HLA-DR binding capacity (IC50 nM) | Total DR |

| | | | | | | |
|---|---|---|---|---|---|---|
| Peptide | DR5w11 | DR6 | DR7 | DR8 | DR9 | alleles bound |

| | | | | | | |
|---|---|---|---|---|---|---|
| F107.03 | 294 | 135 | 167 | 557 | 682 | 10 |
| 1293.06 | 83 | 175 | 76 | 408 | 139 | 10 |
| 1280.06 | 5.6 | 9.5 | 8.1 | 188 | 58 | 9 |
| 1280.09 | 426 | — | 93 | 803 | 221 | 9 |
| 11186.25 769 | 17500 | 1042 | 196 | 938 | 8 | |
| 27.0280 | 42 | — | 114 | 92 | 1667 | 8 |
| CF-08 | 426 | | 124 | | | 5 |
| 27.0281 | 42 | 745 | 61 | 27 | 174 | 8 |
| 1186.15 | 53 | 1944 | 2717 | 74 | 30 | 7 |
| 1280.15 | 488 | 17500 | — | 803 | 1531 | 7 |
| F107.04 | 1667 | 44 | 325 | 845 | 1271 | 7 |
| 1298.04 | 1538 | 814 | 63 | 845 | 3000 | 7 |
| 1298.07 | 1429 | 140 | 43 | 196 | 278 | 7 |
| 857.02 | 263 | 193000 | 676 | 196 | 2273 | 7 |

^{a}A dash (-) indicates IC50 nM > 20.000.

[0459] TABLE XXXVI

HBV-derived DR3-binding peptides

Conservancy

| | | | | | | | |
|---|---|---|---|---|---|---|---|
| Peptide | Mol | 1st Pos | Core | Total | Sequence | +HC,3o SEQ ID NO: | DR3 |

| | | | | | | | |
|---|---|---|---|---|---|---|---|
| 1280.14* | POL | 694 | 95 | 95 | LCQVFADATPTGWGL | 3819 | 67 |
| 35.0096 | POL | 385 | 100 | 45 | ESRLVVDFSQFSRGN | 3820 | 115 |
| 35.0093 | POL | 96 | 85 | 60 | VGPLTVNEKRRLKLI | 3821 | 136 |
| 1186.27 | POL | 420 | 100 | 85 | SSNLSWLSLDVSAAF | 3822 | 200 |
| 1186.18 | POL | 422 | 95 | 85 | NLSWLSLDVSAAFYH | 3823 | 231 |

*tested as peptide 35.0100

[0460] TABLE XXXVIIa

HBV Preferred CTL Epitopes

| | | | | |
|---|---|---|---|---|
| Peptide | Sequence | SEQ ID NO: | Protein | HLA |

| | | | | | |
|---|---|---|---|---|---|
| 924.07 | FLPSDFFPSV | 3824 | core 18 | A2 | |
| 777.03 | FLLTRILTI | 3825 | env 183 | A2 | |
| 927.15 | ALMPLYACI | 3826 | pol 642 | A2 | |
| 1013.01 | WLSLLVPFV | 3827 | env335 | A2 | |
| 1090.77 | YMDDVVLGV | 3828 | pol 538 | A2/A1 | |
| 1168.02 | GLSRYVARL | 3829 | pol 455 | A2 | |
| 927.11 | FLLSLGIHL | 3830 | pol 562 | A2 | |
| 1069.10 | LLPIFFCLWV | 3831 | env 378 | A2 | |
| 1069.06 | LLVPGVQWFV | 3832 | env 338 | A2 | |
| 1147.16 | HTLWKAGILYK | 3833 | pol 149 | A3/A1 | |
| 1083.01 | STLPETTVVRR | 3834 | core 141 | A3 | |
| 1069.16 | NVSIPWTHK | 3835 | pol 47 | A3 | |
| 1069.20 | LVVDFSQFSR | 3836 | pol 388 | A3 | |
| 1090.10 | QAFTFSPTYK | 3837 | pol 665 | A3 | |
| 1090.11 | SAICSVVRR | 3838 | pol 531 | A3 | |
| 1142.05 | KVGNFTGLY | 3839 | pol 629 | A3/A1 | |
| 1147.05 | FPHCLAFSYM | 3840 | pol 530 | B7 | |
| 988.05 | LPSDFFPSV | 3841 | core 19 | B7 | |
| 1145.04 | IPIPSSWAF | 3842 | env 313 | B7 | |
| 1147.02 | HPAAMPHLL | 3843 | pol 429 | B7 | |
| 26.0570 | YPALMPLYACI | 3844 | pol 640 | B7 | |
| 1147.04 | TPARVTGGVF | 3845 | pol | 354 | B7 |
| 1.0519 | DLLDTASALY | 3846 | core 419 | A1 | |
| 2.0239 | LSLDVSAAFY | 3847 | pol 1000 | A1 | |
| 1039.06 | WMMWYWGPSLY | 3848 | env 359 | A1 | |
| 20.0269 | RWMCLRRFII | 3849 | env 236 | A24 | |
| 20.0136 | SWLSLLVPF | 3850 | env 334 | A24 | |
| 20.0137 | SWWTSLNFL | 3851 | env 197 | A24 | |
| 13.0129 EYLVSFGVWI | 3852 | core 117 | A24 | | |
| 1090.02 | AYRPPNAPI | 3853 | core 131 | A24 | |
| 13.0073 | WFHISCLTF | 3854 | core 102 | A24 | |
| 20.0271 | SWPKFAVPNL | 3855 | pol 392 | A24 | |
| 1069.23 | KYTSFPWLL | 3856 | pol 745 | A24 | |
| 2.0181 | LYSHPIILGF | 3857 | pol 492 | A24 | |

[0461] TABLE XXXVIIb

HBV Preferred HTL epitopes

| | |
|---|---|
| Selection | Conservancy |

| | | | | | | | |
|---|---|---|---|---|---|---|---|
| Criteria | Peptide | Mol | 1st Pos | Core | Total | SEQ ID NO: | Sequence |

| | | | | | | | |
|---|---|---|---|---|---|---|---|
| DR supermotif | F107.03 | POL | 412 | 90 | 90 | 3838 | LQSLTNLLSSNLSWL |
| | 1298.06 | POL | 664 | 95 | 60 | 3859 | KQAFTFSPTYKAFLC |
| | 1280.06 | ENV | 180 | 80 | 80 | 3860 | AGFFLLTRILTIPQS |
| | 1280.09 | POL | 774 | 90 | 80 | 3861 | GTSFVYVPSALNPAD |
| | CF-08 | CORE | 120 | | 90 | 3862 | VSFGVWIRTPPAYRPPNAPI |
| | 27.0281 | POL | 145 | 100 | 100 | 3863 | RHYLHTHLWKAGILYK |
| | 1186.15 | ENV | 339 | 95 | 95 | 3864 | LVPFVQWFVGLSPTV |
| | 1280.15 | POL | 501 | 80 | 80 | 3865 | LHLYSHPIILGFRKI |
| | F107.04 | POL | 523 | 95 | 95 | 3866 | PFLLAQFTSAICSVV |
| | 1298.04 | POL | 618 | 80 | 45 | 3867 | KQCFRKLPVNRPIDW |
| | 1298.07 | POL | 767 | 80 | 70 | 3868 | AANWILRGTSFVYVP |
| | 857.02 | CORE | 50 | | 90 | 3869 | PHHTALRQAILCWGELMTLA |
| DR3 motif | 1280.14 | POL | 694 | 95 | 95 | 3870 | LCQVFADATPTGWGL |
| | 35.0096 | POL | 385 | 100 | 45 | 3871 | ESRLVVDFSQFSRGN |
| | 35.0093 | POL | 96 | 85 | 60 | 3872 | VGPLTVNEKRRLKLI |
| | 1186.27 | POL | 420 | 100 | 85 | 3873 | SSNLSWLSLDVSAAF |

[0462] TABLE XXXVIII
Estimated population coverage by a panel of HBV derived HTL epitopes

| | | Representative | No. of | Population coverage (phenotypic frequency) | | | | | |
|---|---|---|---|---|---|---|---|---|---|
| Antigen | Alleles | assay | epitopes² | Cauc. | Blk. | Jpn. | Chn. | Hisp. | Avg. |
| DR1 | DRB1*0101-03 | DR1 | 12 | 18.5 | 8.4 | 10.7 | 4.5 | 10.1 | 10.4 |
| DR2 | DRB1*1501-03 | DR2w2 β1 | 11 | 19.9 | 14.8 | 30.9 | 22.0 | 15.0 | 20.5 |
| DR2 | DRB5*0101 | DR2w2 β2 | 8 | — | — | — | — | — | — |
| DR3 | DRB1*0301-2 | DR3 | 4 | 17.7 | 19.5 | 0.40 | 7.3 | 14.4 | 11.9 |
| DR4 | DRB1*0401-12 | DR4w4 | 11 | 23.6 | 6.1 | 40.4 | 21.9 | 29.8 | 24.4 |
| DR4 | DRB1*0401-12 | DR4w15 | 9 | — | — | — | — | — | — |
| DR7 | DRB1*0701-02 | DR7 | 9 | 26.2 | 11.1 | 1.0 | 15.0 | 16.6 | 14.0 |
| DR8 | DRB1*0801-5 | DR8w2 | 7 | 5.5 | 10.9 | 25.0 | 10.7 | 23.3 | 15.1 |
| DR9 | DRB1*09011, 09012 | DR9 | 10 | 3.6 | 4.7 | 24.5 | 19.9 | 6.7 | 11.9 |
| DR11 | DRB1*1101-05 | DR5w11 | 11 | 17.0 | 18.0 | 4.9 | 19.4 | 18.1 | 15.5 |
| DR13 | DRB1*1301-06 | DR6w19 | 7 | 21.7 | 16.5 | 14.6 | 12.2 | 10.5 | 15.1 |
| Total¹ | | | | 98.5 | 95.1 | 97.1 | 91.3 | 94.3 | 95.1 |

¹Total opulation coverage has been adjusted to acount for the presence of DRX in many ethnic populations. It has been assumed that the range of specificities represented by DRX alleles will mirror those of previously characterized HLA-DR alleles. The proportion of DRX incorporated under each motif is representative of the frequency of the motif in the remainder of the population. Total coverage has not been adjusted to account for unknown gene types.
²Number of epitopes represents a minimal estimate, considering only the epitopes shown in Table 12. Additional alleles possibly bound by nested epitopes have not been accounted.

1-37. (canceled)

38. A minigene construct comprising a polynucleic acid encoding the following epitopes: WLSLLVPFV (SEQ ID NO: 551), HTLWKAGILYK (SEQ ID NO: 605), FLPSDFFPSV (SEQ ID NO: 3492), STLPETTVVRR (SEQ ID NO: 3522), and GLSRYVARL (SEQ ID NO: 3704), wherein the minigene does not encode a wild-type full length protein from Hepatitis B Virus (HBV).

39. The minigene construct of claim 38, which further comprises one or a plurality of spacer nucleic acids.

40. The minigene construct of claim 38, which further comprises a member selected from the group consisting of:
(1) at least one cytotoxic T lymphocyte (CTL) epitope;
(2) at least one helper T lymphocyte (HTL) epitope; and
(3) a nucleic acid encoding at least one of the epitopes of Table XXXVIIa or Table XXXVIIb.

41. The minigene of claim 38, further comprising a nucleic acid encoding the epitope YMDDVVLGV (SEQ ID NO: 3828) or YMDDVVLGA (SEQ ID NO: 564).

42. The minigene construct of claim 40, wherein the at least one HTL epitope is a PADRE® epitope.

43. The minigene construct of claim 38, further comprising a signal sequence.

44. A vector comprising the minigene of claim 38.

45. The vector of claim 44, which is selected from the group consisting of a plasmid, a viral vector, and a bacterial vector.

46. The vector of claim 45, wherein the viral vector is vaccinia virus.

47. The vector of claim 46, which is a recombinant MVA.

48. A composition comprising the minigene of claim 38, and a pharmaceutical excipient.

49. The composition of claim 48, wherein the pharmaceutical excipient comprises an adjuvant.

50. The composition of claim 48, further comprising a member selected from the group consisting of:
(1) a liposome, wherein the epitopes are on or within the liposome; and
(2) an antigen presenting cell, wherein the epitopes are on or within the antigen presenting cell.

51. The composition of claim 50, wherein the epitopes are joined to a lipid.

52. The composition of claim 50, wherein the antigen presenting cell is a dendritic cell.

53. The composition according to claim 48, which is a vaccine composition.

54. A composition comprising the vector of claim 44, and a pharmaceutical excipient.

55. A method of inducing an immune response against Hepatitis B Virus (HBV) comprising administering the composition of claim 48.

56. A method of treating and/or preventing HBV comprising administering the composition of claim 48.

57. The method of claim 56, comprising the use of a prime boost protocol, wherein the prime boost protocol comprises administration of a boosting agent.

58. The method of claim 57, wherein the boosting agent comprises the minigene.

59. A polyepitopic peptide comprising the following epitopes: WLSLLVPFV (SEQ ID NO: 551), HTLWKAGILYK (SEQ ID NO: 605), FLPSDFFPSV (SEQ ID NO: 3492), STLPETTVVRR (SEQ ID NO: 3522), and GLSRYVARL (SEQ ID NO: 3704), wherein the polyepitopic peptide is not a wild-type full length protein from Hepatitis B Virus (HBV).

60. A polyepitopic peptide according to claim 59, whereby the epitopes are linked by a spacer molecule.

61. The polyepitopic peptide of claim 59, which further comprises a member selected from the group consisting of:
(1) at least one cytotoxic T lymphocyte (CTL) epitope;
(2) at least one helper T lymphocyte (HTL) epitope; and
(3) at least one of the epitopes of Table XXXVIIa or Table XXXVIIb.

62. The polyepitopic peptide of claim 59, further comprising the epitope YMDDVVLGV (SEQ ID NO: 3828) or YMDDVVLGA (SEQ ID NO: 564).

63. The polyepitopic peptide of claim 59, wherein the at least one HTL epitope is a PADRE® epitope.

64. The polyepitopic peptide of claim 59, further comprising a signal sequence.

65. A composition comprising the polyepitopic peptide of claim 59, and a pharmaceutical excipient.

66. A method of inducing an immune response against Hepatitis B Virus (HBV) comprising administering the composition of claim 65.

67. A method of treating and/or preventing HBV comprising administering the composition of claim 65.

68. The method of claim 67, comprising the use of a prime boost protocol, wherein the prime boost protocol comprises administration of a boosting agent.

69. The method of claim 68, wherein the boosting agent comprises the polyepitopic peptide.

The application's sequence listing, which the Patent Office published only in electronic form, follows.

SEQUENCE LISTING (3879 sequences)

SEQ ID NO: 1 - protein, 10 aa, Artificial Sequence
  Artificially Synthesized Peptide
AICSVVRRAF

SEQ ID NO: 2 - protein, 9 aa, Artificial Sequence
  Artificially Synthesized Peptide
ALRQAILCW

SEQ ID NO: 3 - protein, 9 aa, Artificial Sequence
  Artificially Synthesized Peptide
AMQWNSTTF

SEQ ID NO: 4 - protein, 8 aa, Artificial Sequence
  Artificially Synthesized Peptide
ASFCGSPY

SEQ ID NO: 5 - protein, 10 aa, Artificial Sequence
  Artificially Synthesized Peptide
ASFCGSPYSW

SEQ ID NO: 6 - protein, 8 aa, Artificial Sequence
  Artificially Synthesized Peptide
ASKLCLGW

SEQ ID NO: 7 - protein, 10 aa, Artificial Sequence
  Artificially Synthesized Peptide
ASKLCLGWLW

SEQ ID NO: 8 - protein, 8 aa, Artificial Sequence
  Artificially Synthesized Peptide
ASPLHVAW

SEQ ID NO: 9 - protein, 8 aa, Artificial Sequence
  Artificially Synthesized Peptide
CIPIPSSW

SEQ ID NO: 10 - protein, 10 aa, Artificial Sequence
  Artificially Synthesized Peptide
CIPIPSSWAF

SEQ ID NO: 11 - protein, 11 aa, Artificial Sequence
  Artificially Synthesized Peptide
CLIFLLVLLDY

SEQ ID NO: 12 - protein, 8 aa, Artificial Sequence
  Artificially Synthesized Peptide
CLRRFIIF

SEQ ID NO: 13 - protein, 10 aa, Artificial Sequence
  Artificially Synthesized Peptide
CLRRFIIFLF

SEQ ID NO: 14 - protein, 8 aa, Artificial Sequence
  Artificially Synthesized Peptide
CSVVRRAF

SEQ ID NO: 15 - protein, 10 aa, Artificial Sequence
  Artificially Synthesized Peptide
CTCIPIPSSW

SEQ ID NO: 16 - protein, 8 aa, Artificial Sequence
  Artificially Synthesized Peptide
DIDPYKEF

SEQ ID NO: 17 - protein, 10 aa, Artificial Sequence
  Artificially Synthesized Peptide
DLLDTASALY

SEQ ID NO: 18 - protein, 9 aa, Artificial Sequence
  Artificially Synthesized Peptide
DSWWTSLNF

SEQ ID NO: 19 - protein, 10 aa, Artificial Sequence
  Artificially Synthesized Peptide
ELLSFLPSDF

SEQ ID NO: 20 - protein, 11 aa, Artificial Sequence
  Artificially Synthesized Peptide
ELLSFLPSDFF

SEQ ID NO: 21 - protein, 8 aa, Artificial Sequence
  Artificially Synthesized Peptide
ESRLVVDF

SEQ ID NO: 22 - protein, 11 aa, Artificial Sequence
  Artificially Synthesized Peptide
ESRLVVDFSQF

SEQ ID NO: 23 - protein, 9 aa, Artificial Sequence
  Artificially Synthesized Peptide
FILLLCLIF

SEQ ID NO: 24 - protein, 11 aa, Artificial Sequence
  Artificially Synthesized Peptide
FLFILLLCLIF

SEQ ID NO: 25 - protein, 8 aa, Artificial Sequence
  Artificially Synthesized Peptide
FLLVLLDY

SEQ ID NO: 26 - protein, 8 aa, Artificial Sequence
  Artificially Synthesized Peptide
FSPTYKAF

SEQ ID NO: 27 - protein, 11 aa, Artificial Sequence
  Artificially Synthesized Peptide
FSSAGPCALRF

SEQ ID NO: 28 - protein, 10 aa, Artificial Sequence
  Artificially Synthesized Peptide
FSWLSLLVPF

SEQ ID NO: 29 - protein, 10 aa, Artificial Sequence
  Artificially Synthesized Peptide
FTFSPTYKAF

SEQ ID NO: 30 - protein, 9 aa, Artificial Sequence
  Artificially Synthesized Peptide
FVGLSPTVW

SEQ ID NO: 31 - protein, 9 aa, Artificial Sequence
  Artificially Synthesized Peptide
GLLGFAAPF

SEQ ID NO: 32 - protein, 10 aa, Artificial Sequence
  Artificially Synthesized Peptide
GLSPFLLAQF

SEQ ID NO: 33 - protein, 10 aa, Artificial Sequence
  Artificially Synthesized Peptide
GMDIDPYKEF

SEQ ID NO: 34 - protein, 10 aa, Artificial Sequence
  Artificially Synthesized Peptide
GVWIRTPPAY

SEQ ID NO: 35 - protein, 10 aa, Artificial Sequence
  Artificially Synthesized Peptide
HLNPNKTKRW

SEQ ID NO: 36 - protein, 11 aa, Artificial Sequence
  Artificially Synthesized Peptide
HLYSHPIILGF

SEQ ID NO: 37 - protein, 10 aa, Artificial Sequence
  Artificially Synthesized Peptide
HTAELLAACF

SEQ ID NO: 38 - protein, 11 aa, Artificial Sequence
  Artificially Synthesized Peptide
HTALRQAILCW

SEQ ID NO: 39 - protein, 10 aa, Artificial Sequence
  Artificially Synthesized Peptide
HTLWKAGILY

SEQ ID NO: 40 - protein, 8 aa, Artificial Sequence
  Artificially Synthesized Peptide
ILLLCLIF

SEQ ID NO: 41 - protein, 9 aa, Artificial Sequence
  Artificially Synthesized Peptide
ILRGTSFVY

SEQ ID NO: 42 - protein, 11 aa, Artificial Sequence
  Artificially Synthesized Peptide
ILTIPQSLDSW

SEQ ID NO: 43 - protein, 11 aa, Artificial Sequence
  Artificially Synthesized Peptide
IVGLLGFAAPF

SEQ ID NO: 44 - protein, 11 aa, Artificial Sequence
  Artificially Synthesized Peptide
KIPMGVGLSPF

SEQ ID NO: 45 - protein, 8 aa, Artificial Sequence
  Artificially Synthesized Peptide
KLCLGWLW

SEQ ID NO: 46 - protein, 8 aa, Artificial Sequence
  Artificially Synthesized Peptide
KLIMPARF

SEQ ID NO: 47 - protein, 9 aa, Artificial Sequence
  Artificially Synthesized Peptide
KLIMPARFY

SEQ ID NO: 48 - protein, 10 aa, Artificial Sequence
  Artificially Synthesized Peptide
KLPVNRPIDW

SEQ ID NO: 49 - protein, 11 aa, Artificial Sequence
  Artificially Synthesized Peptide
KTKRWGYSLNF

SEQ ID NO: 50 - protein, 9 aa, Artificial Sequence
  Artificially Synthesized Peptide
KVGNFTGLY

SEQ ID NO: 51 - protein, 10 aa, Artificial Sequence
  Artificially Synthesized Peptide
LIFLLVLLDY

SEQ ID NO: 52 - protein, 8 aa, Artificial Sequence
  Artificially Synthesized Peptide
LIMPARFY

SEQ ID NO: 53 - protein, 9 aa, Artificial Sequence
  Artificially Synthesized Peptide
LLDTASALY

SEQ ID NO: 54 - protein, 8 aa, Artificial Sequence
  Artificially Synthesized Peptide
LLGCAANW

SEQ ID NO: 55 - protein, 8 aa, Artificial Sequence
  Artificially Synthesized Peptide
LLGFAAPF

SEQ ID NO: 56 - protein, 9 aa, Artificial Sequence
  Artificially Synthesized Peptide
LLPIFFCLW

SEQ ID NO: 57 - protein, 11 aa, Artificial Sequence
  Artificially Synthesized Peptide
LLPIFFCLWVY

SEQ ID NO: 58 - protein, 9 aa, Artificial Sequence
  Artificially Synthesized Peptide
LLSFLPSDF

SEQ ID NO: 59 - protein, 10 aa, Artificial Sequence
  Artificially Synthesized Peptide
LLSFLPSDFF

SEQ ID NO: 60 - protein, 8 aa, Artificial Sequence
  Artificially Synthesized Peptide
LLSSNLSW

SEQ ID NO: 61 - protein, 8 aa, Artificial Sequence
  Artificially Synthesized Peptide
LLVLQAGF

SEQ ID NO: 62 - protein, 9 aa, Artificial Sequence
  Artificially Synthesized Peptide
LLVLQAGFF

SEQ ID NO: 63 - protein, 8 aa, Artificial Sequence
  Artificially Synthesized Peptide
LLVPFVQW

SEQ ID NO: 64 - protein, 9 aa, Artificial Sequence
  Artificially Synthesized Peptide
LLVPFVQWF

SEQ ID NO: 65 - protein, 11 aa, Artificial Sequence
  Artificially Synthesized Peptide
LLWFHISCLTF

SEQ ID NO: 66 - protein, 8 aa, Artificial Sequence
  Artificially Synthesized Peptide
LSFLPSDF

SEQ ID NO: 67 - protein, 9 aa, Artificial Sequence
  Artificially Synthesized Peptide
LSFLPSDFF

SEQ ID NO: 68 - protein, 9 aa, Artificial Sequence
  Artificially Synthesized Peptide
LSLDVSAAF

SEQ ID NO: 69 - protein, 10 aa, Artificial Sequence
  Artificially Synthesized Peptide
LSLDVSAAFY

SEQ ID NO: 70 - protein, 10 aa, Artificial Sequence
  Artificially Synthesized Peptide
LSLLVPFVQW

SEQ ID NO: 71 - protein, 11 aa, Artificial Sequence
  Artificially Synthesized Peptide
LSLLVPFVQWF

SEQ ID NO: 72 - protein, 11 aa, Artificial Sequence
  Artificially Synthesized Peptide
LSLRGLPVCAF

SEQ ID NO: 73 - protein, 9 aa, Artificial Sequence
  Artificially Synthesized Peptide
LSPFLLAQF

SEQ ID NO: 74 - protein, 11 aa, Artificial Sequence
  Artificially Synthesized Peptide
LSPTVWLSVIW

SEQ ID NO: 75 - protein, 8 aa, Artificial Sequence
  Artificially Synthesized Peptide
LSRKYTSF

SEQ ID NO: 76 - protein, 10 aa, Artificial Sequence
  Artificially Synthesized Peptide
LSRKYTSFPW

SEQ ID NO: 77 - protein, 9 aa, Artificial Sequence
  Artificially Synthesized Peptide
LSVPNPLGF

SEQ ID NO: 78 - protein, 11 aa, Artificial Sequence
  Artificially Synthesized Peptide
LTFGRETVLEY

SEQ ID NO: 79 - protein, 10 aa, Artificial Sequence
  Artificially Synthesized Peptide
LTIPQSLDSW

SEQ ID NO: 80 - protein, 11 aa, Artificial Sequence
  Artificially Synthesized Peptide
LTIPQSLDSWW

SEQ ID NO: 81 - protein, 11 aa, Artificial Sequence
  Artificially Synthesized Peptide
LTNLLSSNLSW

SEQ ID NO: 82 - protein, 8 aa, Artificial Sequence
  Artificially Synthesized Peptide
LVLQAGFF

SEQ ID NO: 83 - protein, 8 aa, Artificial Sequence
  Artificially Synthesized Peptide
LVPFVQWF

SEQ ID NO: 84 - protein, 8 aa, Artificial Sequence
  Artificially Synthesized Peptide
LVVDFSQF

SEQ ID NO: 85 - protein, 10 aa, Artificial Sequence
  Artificially Synthesized Peptide
MMWYWGPSLY

SEQ ID NO: 86 - protein, 9 aa, Artificial Sequence
  Artificially Synthesized Peptide
MSTTDLEAY

SEQ ID NO: 87 - protein, 10 aa, Artificial Sequence
  Artificially Synthesized Peptide
MSTTDLEAYF

SEQ ID NO: 88 - protein, 11 aa, Artificial Sequence
  Artificially Synthesized Peptide
NLGNLNVSIPW

SEQ ID NO: 89 - protein, 9 aa, Artificial Sequence
  Artificially Synthesized Peptide
NLLSSNLSW

SEQ ID NO: 90 - protein, 8 aa, Artificial Sequence
  Artificially Synthesized Peptide
NLNVSIPW

SEQ ID NO: 91 - protein, 10 aa, Artificial Sequence
  Artificially Synthesized Peptide
NLSVPNPLGF

SEQ ID NO: 92 - protein, 9 aa, Artificial Sequence
  Artificially Synthesized Peptide
NSVVLSRKY

SEQ ID NO: 93 - protein, 9 aa, Artificial Sequence
  Artificially Synthesized Peptide
PIFFCLWVY

SEQ ID NO: 94 - protein, 8 aa, Artificial Sequence
  Artificially Synthesized Peptide
PIPSSWAF

SEQ ID NO: 95 - protein, 9 aa, Artificial Sequence
  Artificially Synthesized Peptide
PLDKGIKPY

SEQ ID NO: 96 - protein, 10 aa, Artificial Sequence
  Artificially Synthesized Peptide
PLDKGIKPYY

SEQ ID NO: 97 - protein, 10 aa, Artificial Sequence
  Artificially Synthesized Peptide
PLLPIFFCLW

SEQ ID NO: 98 - protein, 9 aa, Artificial Sequence
  Artificially Synthesized Peptide
PLLVLQAGF

SEQ ID NO: 99 - protein, 10 aa, Artificial Sequence
  Artificially Synthesized Peptide
PLLVLQAGFF

SEQ ID NO: 100 - protein, 9 aa, Artificial Sequence
  Artificially Synthesized Peptide
PMGVGLSPF

SEQ ID NO: 101 - protein, 9 aa, Artificial Sequence
  Artificially Synthesized Peptide
PTTGRTSLY

SEQ ID NO: 102 - protein, 9 aa, Artificial Sequence
  Artificially Synthesized Peptide
PTVWLSVIW

SEQ ID NO: 103 - protein, 8 aa, Artificial Sequence
  Artificially Synthesized Peptide
PVNRPIDW

SEQ ID NO: 104 - protein, 11 aa, Artificial Sequence
  Artificially Synthesized Peptide
QVFADATPTGW

SEQ ID NO: 105 - protein, 8 aa, Artificial Sequence
  Artificially Synthesized Peptide
RIVGLLGF

SEQ ID NO: 106 - protein, 10 aa, Artificial Sequence
  Artificially Synthesized Peptide
RLKLIMPARF

SEQ ID NO: 107 - protein, 11 aa, Artificial Sequence
  Artificially Synthesized Peptide
RLKLIMPARFY

SEQ ID NO: 108 - protein, 9 aa, Artificial Sequence
  Artificially Synthesized Peptide
RLVVDFSQF

SEQ ID NO: 109 - protein, 11 aa, Artificial Sequence
  Artificially Synthesized Peptide
RTPARVTGGVF

SEQ ID NO: 110 - protein, 11 aa, Artificial Sequence
  Artificially Synthesized Peptide
SIPWTHKVGNF

SEQ ID NO: 111 - protein, 11 aa, Artificial Sequence
  Artificially Synthesized Peptide
SLDSWWTSLNF

SEQ ID NO: 112 - protein, 8 aa, Artificial Sequence
  Artificially Synthesized Peptide
SLDVSAAF

SEQ ID NO: 113 - protein, 9 aa, Artificial Sequence
  Artificially Synthesized Peptide
SLDVSAAFY

SEQ ID NO: 114 - protein, 9 aa, Artificial Sequence
  Artificially Synthesized Peptide
SLLVPFVQW

SEQ ID NO: 115 - protein, 10 aa, Artificial Sequence
  Artificially Synthesized Peptide
SLLVPFVQWF

SEQ ID NO: 116 - protein, 10 aa, Artificial Sequence
  Artificially Synthesized Peptide
SLRGLPVCAF

SEQ ID NO: 117 - protein, 10 aa, Artificial Sequence
  Artificially Synthesized Peptide
SSAGPCALRF

SEQ ID NO: 118 - protein, 8 aa, Artificial Sequence
  Artificially Synthesized Peptide
STTDLEAY

SEQ ID NO: 119 - protein, 9 aa, Artificial Sequence
  Artificially Synthesized Peptide
STTDLEAYF

SEQ ID NO: 120 - protein, 8 aa, Artificial Sequence
  Artificially Synthesized Peptide
SVPNPLGF

SEQ ID NO: 121 - protein, 8 aa, Artificial Sequence
  Artificially Synthesized Peptide
SVVLSRKY

SEQ ID NO: 122 - protein, 11 aa, Artificial Sequence
  Artificially Synthesized Peptide
SVVLSRKYTSF

SEQ ID NO: 123 - protein, 9 aa, Artificial Sequence
  Artificially Synthesized Peptide
TIPQSLDSW

SEQ ID NO: 124 - protein, 10 aa, Artificial Sequence
  Artificially Synthesized Peptide
TIPQSLDSWW

SEQ ID NO: 125 - protein, 9 aa, Artificial Sequence
  Artificially Synthesized Peptide
TLWKAGILY

SEQ ID NO: 126 - protein, 8 aa, Artificial Sequence
  Artificially Synthesized Peptide
TTDLEAYF

SEQ ID NO: 127 - protein, 8 aa, Artificial Sequence
  Artificially Synthesized Peptide
TTGRTSLY

SEQ ID NO: 128 - protein, 11 aa, Artificial Sequence
  Artificially Synthesized Peptide
TVQASKLCLGW

SEQ ID NO: 129 - protein, 8 aa, Artificial Sequence
  Artificially Synthesized Peptide
TVWLSVIW

SEQ ID NO: 130 - protein, 9 aa, Artificial Sequence
  Artificially Synthesized Peptide
VLSRKYTSF

SEQ ID NO: 131 - protein, 11 aa, Artificial Sequence
  Artificially Synthesized Peptide
VLSRKYTSFPW

SEQ ID NO: 132 - protein, 10 aa, Artificial Sequence
  Artificially Synthesized Peptide
VVLSRKYTSF

SEQ ID NO: 133 - protein, 8 aa, Artificial Sequence
  Artificially Synthesized Peptide
WILRGTSF

SEQ ID NO: 134 - protein, 10 aa, Artificial Sequence
  Artificially Synthesized Peptide
WILRGTSFVY

SEQ ID NO: 135 - protein, 8 aa, Artificial Sequence
  Artificially Synthesized Peptide
WIRTPPAY

SEQ ID NO: 136 - protein, 9 aa, Artificial Sequence
  Artificially Synthesized Peptide
WLLGCAANW

SEQ ID NO: 137 - protein, 10 aa, Artificial Sequence
  Artificially Synthesized Peptide
WLSLDVSAAF

SEQ ID NO: 138 - protein, 11 aa, Artificial Sequence
  Artificially Synthesized Peptide
WLSLDVSAAFY

SEQ ID NO: 139 - protein, 8 aa, Artificial Sequence
  Artificially Synthesized Peptide
WLSLLVPF

SEQ ID NO: 140 - protein, 11 aa, Artificial Sequence
  Artificially Synthesized Peptide
WLSLLVPFVQW

SEQ ID NO: 141 - protein, 10 aa, Artificial Sequence
  Artificially Synthesized Peptide
WLWGMDIDPY

SEQ ID NO: 142 - protein, 10 aa, Artificial Sequence
  Artificially Synthesized Peptide
WMCLRRFIIF

SEQ ID NO: 143 - protein, 11 aa, Artificial Sequence
  Artificially Synthesized Peptide
WMMWYWGPSLY

SEQ ID NO: 144 - protein, 8 aa, Artificial Sequence
  Artificially Synthesized Peptide
WTHKVGNF

SEQ ID NO: 145 - protein, 11 aa, Artificial Sequence
  Artificially Synthesized Peptide
YLPLDKGIKPY

SEQ ID NO: 146 - protein, 8 aa, Artificial Sequence
  Artificially Synthesized Peptide
YLVSFGVW

SEQ ID NO: 147 - protein, 9 aa, Artificial Sequence
  Artificially Synthesized Peptide
YSHPIILGF

SEQ ID NO: 148 - protein, 8 aa, Artificial Sequence
  Artificially Synthesized Peptide
YSLNFMGY

SEQ ID NO: 149 - protein, 11 aa, Artificial Sequence
  Artificially Synthesized Peptide
AACFARSRSGA

SEQ ID NO: 150 - protein, 8 aa, Artificial Sequence
  Artificially Synthesized Peptide
AAMPHLLV

SEQ ID NO: 151 - protein, 9 aa, Artificial Sequence
  Artificially Synthesized Peptide
AANWILRGT

SEQ ID NO: 152 - protein, 11 aa, Artificial Sequence
  Artificially Synthesized Peptide
AAPFTQCGYPA

SEQ ID NO: 153 - protein, 9 aa, Artificial Sequence
  Artificially Synthesized Peptide
AICSVVRRA

SEQ ID NO: 154 - protein, 8 aa, Artificial Sequence
  Artificially Synthesized Peptide
AILCWGEL

SEQ ID NO: 155 - protein, 9 aa, Artificial Sequence
  Artificially Synthesized Peptide
AILCWGELM

SEQ ID NO: 156 - protein, 9 aa, Artificial Sequence
  Artificially Synthesized Peptide
ALMPLYACI

SEQ ID NO: 157 - protein, 8 aa, Artificial Sequence
  Artificially Synthesized Peptide
AMQWNSTT

SEQ ID NO: 158 - protein, 9 aa, Artificial Sequence
  Artificially Synthesized Peptide
AMSTTDLEA

SEQ ID NO: 159 - protein, 10 aa, Artificial Sequence
  Artificially Synthesized Peptide
AQFTSAICSV

SEQ ID NO: 160 - protein, 11 aa, Artificial Sequence
  Artificially Synthesized Peptide
AQFTSAICSVV

SEQ ID NO: 161 - protein, 8 aa, Artificial Sequence
  Artificially Synthesized Peptide
ATPTGWGL

SEQ ID NO: 162 - protein, 9 aa, Artificial Sequence
  Artificially Synthesized Peptide
ATPTGWGLA

SEQ ID NO: 163 - protein, 10 aa, Artificial Sequence
  Artificially Synthesized Peptide
ATPTGWGLAI

SEQ ID NO: 164 - protein, 8 aa, Artificial Sequence
  Artificially Synthesized Peptide
AVPNLQSL

SEQ ID NO: 165 - protein, 9 aa, Artificial Sequence
  Artificially Synthesized Peptide
AVPNLQSLT

SEQ ID NO: 166 - protein, 11 aa, Artificial Sequence
  Artificially Synthesized Peptide
AVPNLQSLTNL

SEQ ID NO: 167 - protein, 10 aa, Artificial Sequence
  Artificially Synthesized Peptide
CAANWILRGT

SEQ ID NO: 168 - protein, 10 aa, Artificial Sequence
  Artificially Synthesized Peptide
CAFSSAGPCA

SEQ ID NO: 169 - protein, 11 aa, Artificial Sequence
  Artificially Synthesized Peptide
CAFSSAGPCAL

SEQ ID NO: 170 - protein, 8 aa, Artificial Sequence
  Artificially Synthesized Peptide
CALRFTSA

SEQ ID NO: 171 - protein, 9 aa, Artificial Sequence
  Artificially Synthesized Peptide
CIPIPSSWA

SEQ ID NO: 172 - protein, 11 aa, Artificial Sequence
  Artificially Synthesized Peptide
CIPIPSSWAFA

SEQ ID NO: 173 - protein, 10 aa, Artificial Sequence
  Artificially Synthesized Peptide
CLAFSYMDDV

SEQ ID NO: 174 - protein, 11 aa, Artificial Sequence
  Artificially Synthesized Peptide
CLAFSYMDDVV

SEQ ID NO: 175 - protein, 8 aa, Artificial Sequence
  Artificially Synthesized Peptide
CLGWLWGM

SEQ ID NO: 176 - protein, 10 aa, Artificial Sequence
  Artificially Synthesized Peptide
CLGWLWGMDI

SEQ ID NO: 177 - protein, 8 aa, Artificial Sequence
  Artificially Synthesized Peptide
CLIFLLVL

SEQ ID NO: 178 - protein, 9 aa, Artificial Sequence
  Artificially Synthesized Peptide
CLIFLLVLL

SEQ ID NO: 179 - protein, 9 aa, Artificial Sequence
  Artificially Synthesized Peptide
CLRRFIIFL

SEQ ID NO: 180 - protein, 11 aa, Artificial Sequence
  Artificially Synthesized Peptide
CLRRFIIFLFI

SEQ ID NO: 181 - protein, 8 aa, Artificial Sequence
  Artificially Synthesized Peptide
CLTFGRET

SEQ ID NO: 182 - protein, 9 aa, Artificial Sequence
  Artificially Synthesized Peptide
CLTFGRETV

SEQ ID NO: 183 - protein, 9 aa, Artificial Sequence
  Artificially Synthesized Peptide
CQLDPARDV

SEQ ID NO: 184 - protein, 10 aa, Artificial Sequence
  Artificially Synthesized Peptide
CQLDPARDVL

SEQ ID NO: 185 - protein, 8 aa, Artificial Sequence
  Artificially Synthesized Peptide
CQRIVGLL

SEQ ID NO: 186 - protein, 11 aa, Artificial Sequence
  Artificially Synthesized Peptide
CQRIVGLLGFA

SEQ ID NO: 187 - protein, 8 aa, Artificial Sequence
  Artificially Synthesized Peptide
CQVFADAT

SEQ ID NO: 188 - protein, 10 aa, Artificial Sequence
  Artificially Synthesized Peptide
CQVFADATPT

SEQ ID NO: 189 - protein, 11 aa, Artificial Sequence
  Artificially Synthesized Peptide
CTCIPIPSSWA

SEQ ID NO: 190 - protein, 9 aa, Artificial Sequence
  Artificially Synthesized Peptide
DATPTGWGL

SEQ ID NO: 191 - protein, 10 aa, Artificial Sequence
  Artificially Synthesized Peptide
DATPTGWGLA

SEQ ID NO: 192 - protein, 11 aa, Artificial Sequence
  Artificially Synthesized Peptide
DATPTGWGLAI

SEQ ID NO: 193 - protein, 10 aa, Artificial Sequence
  Artificially Synthesized Peptide
DIDPYKEFGA

SEQ ID NO: 194 - protein, 8 aa, Artificial Sequence
  Artificially Synthesized Peptide
DLLDTASA

SEQ ID NO: 195 - protein, 9 aa, Artificial Sequence
  Artificially Synthesized Peptide
DLLDTASAL

SEQ ID NO: 196 - protein, 9 aa, Artificial Sequence
  Artificially Synthesized Peptide
DLNLGNLNV

SEQ ID NO: 197 - protein, 11 aa, Artificial Sequence
  Artificially Synthesized Peptide
DLNLGNLNVSI

SEQ ID NO: 198 - protein, 10 aa, Artificial Sequence
  Artificially Synthesized Peptide
DTASALYREA

SEQ ID NO: 199 - protein, 11 aa, Artificial Sequence
  Artificially Synthesized Peptide
DTASALYREAL

SEQ ID NO: 200 - protein, 8 aa, Artificial Sequence
  Artificially Synthesized Peptide
DVLCLRPV

SEQ ID NO: 201 - protein, 10 aa, Artificial Sequence
  Artificially Synthesized Peptide
DVLCLRPVGA

SEQ ID NO: 202 - protein, 9 aa, Artificial Sequence
  Artificially Synthesized Peptide
DVVLGAKSV

SEQ ID NO: 203 - protein, 9 aa, Artificial Sequence
  Artificially Synthesized Peptide
EAGPLEEEL

SEQ ID NO: 204 - protein, 8 aa, Artificial Sequence
  Artificially Synthesized Peptide
ELGEEIRL

SEQ ID NO: 205 - protein, 8 aa, Artificial Sequence
  Artificially Synthesized Peptide
ELLAACFA

SEQ ID NO: 206 - protein, 8 aa, Artificial Sequence
  Artificially Synthesized Peptide
ETVLEYLV

SEQ ID NO: 207 - protein, 11 aa, Artificial Sequence
  Artificially Synthesized Peptide
FADATPTGWGL

SEQ ID NO: 208 - protein, 8 aa, Artificial Sequence
  Artificially Synthesized Peptide
FARSRSGA

SEQ ID NO: 209 - protein, 8 aa, Artificial Sequence
  Artificially Synthesized Peptide
FASPLHVA

SEQ ID NO: 210 - protein, 9 aa, Artificial Sequence
  Artificially Synthesized Peptide
FAVPNLQSL

SEQ ID NO: 211 - protein, 10 aa, Artificial Sequence
  Artificially Synthesized Peptide
FAVPNLQSLT

SEQ ID NO: 212 - protein, 8 aa, Artificial Sequence
  Artificially Synthesized Peptide
FIIFLFIL

SEQ ID NO: 213 - protein, 9 aa, Artificial Sequence
  Artificially Synthesized Peptide
FIIFLFILL

SEQ ID NO: 214 - protein, 10 aa, Artificial Sequence
  Artificially Synthesized Peptide
FIIFLFILLL

SEQ ID NO: 215 - protein, 8 aa, Artificial Sequence
  Artificially Synthesized Peptide
FILLLCLI

SEQ ID NO: 216 - protein, 10 aa, Artificial Sequence
  Artificially Synthesized Peptide
FILLLCLIFL

SEQ ID NO: 217 - protein, 11 aa, Artificial Sequence
  Artificially Synthesized Peptide
FILLLCLIFLL

SEQ ID NO: 218 - protein, 9 aa, Artificial Sequence
  Artificially Synthesized Peptide
FLFILLLCL

SEQ ID NO: 219 - protein, 10 aa, Artificial Sequence
  Artificially Synthesized Peptide
FLFILLLCLI

SEQ ID NO: 220 - protein, 8 aa, Artificial Sequence
  Artificially Synthesized Peptide
FLGPLLVL

SEQ ID NO: 221 - protein, 10 aa, Artificial Sequence
  Artificially Synthesized Peptide
FLGPLLVLQA

SEQ ID NO: 222 - protein, 9 aa, Artificial Sequence
  Artificially Synthesized Peptide
FLLAQFTSA

SEQ ID NO: 223 - protein, 10 aa, Artificial Sequence
  Artificially Synthesized Peptide
FLLAQFTSAI

SEQ ID NO: 224 - protein, 9 aa, Artificial Sequence
  Artificially Synthesized Peptide
FLLSLGIHL

SEQ ID NO: 225 - protein, 8 aa, Artificial Sequence
  Artificially Synthesized Peptide
FLLTRILT

SEQ ID NO: 226 - protein, 9 aa, Artificial Sequence
  Artificially Synthesized Peptide
FLLTRILTI

SEQ ID NO: 227 - protein, 11 aa, Artificial Sequence
  Artificially Synthesized Peptide
FLLVLLDYQGM

SEQ ID NO: 228 - protein, 10 aa, Artificial Sequence
  Artificially Synthesized Peptide
FLVDKNPHNT

SEQ ID NO: 229 - protein, 9 aa, Artificial Sequence
  Artificially Synthesized Peptide
FTFSPTYKA

SEQ ID NO: 230 - protein, 11 aa, Artificial Sequence
  Artificially Synthesized Peptide
FTFSPTYKAFL

SEQ ID NO: 231 - protein, 8 aa, Artificial Sequence
  Artificially Synthesized Peptide
FTGLYSST

SEQ ID NO: 232 - protein, 9 aa, Artificial Sequence
  Artificially Synthesized Peptide
FTGLYSSTV

SEQ ID NO: 233 - protein, 8 aa, Artificial Sequence
  Artificially Synthesized Peptide
FTQCGYPA

SEQ ID NO: 234 - protein, 9 aa, Artificial Sequence
  Artificially Synthesized Peptide
FTQCGYPAL

SEQ ID NO: 235 - protein, 10 aa, Artificial Sequence
  Artificially Synthesized Peptide
FTQCGYPALM

SEQ ID NO: 236 - protein, 8 aa, Artificial Sequence
  Artificially Synthesized Peptide
FTSAICSV

SEQ ID NO: 237 - protein, 9 aa, Artificial Sequence
  Artificially Synthesized Peptide
FTSAICSVV

SEQ ID NO: 238 - protein, 8 aa, Artificial Sequence
  Artificially Synthesized Peptide
FVGLSPTV

SEQ ID NO: 239 - protein, 10 aa, Artificial Sequence
  Artificially Synthesized Peptide
FVGLSPTVWL

SEQ ID NO: 240 - protein, 10 aa, Artificial Sequence
  Artificially Synthesized Peptide
FVLGGCRHKL

SEQ ID NO: 241 - protein, 11 aa, Artificial Sequence
  Artificially Synthesized Peptide
FVLGGCRHKLV

SEQ ID NO: 242 - protein, 8 aa, Artificial Sequence
  Artificially Synthesized Peptide
FVQWFVGL

SEQ ID NO: 243 - protein, 11 aa, Artificial Sequence
  Artificially Synthesized Peptide
FVQWFVGLSPT

SEQ ID NO: 244 - protein, 8 aa, Artificial Sequence
  Artificially Synthesized Peptide
FVYVPSAL

SEQ ID NO: 245 - protein, 11 aa, Artificial Sequence
  Artificially Synthesized Peptide
FVYVPSALNPA

SEQ ID NO: 246 - protein, 9 aa, Artificial Sequence
  Artificially Synthesized Peptide
GAHLSLRGL

SEQ ID NO: 247 - protein, 11 aa, Artificial Sequence
  Artificially Synthesized Peptide
GAHLSLRGLPV

SEQ ID NO: 248 - protein, 8 aa, Artificial Sequence
  Artificially Synthesized Peptide
GAKSVQHL

SEQ ID NO: 249 - protein, 11 aa, Artificial Sequence
  Artificially Synthesized Peptide
GAKSVQHLESL

SEQ ID NO: 250 - protein, 9 aa, Artificial Sequence
  Artificially Synthesized Peptide
GIHLNPNKT

SEQ ID NO: 251 - protein, 8 aa, Artificial Sequence
  Artificially Synthesized Peptide
GILYKRET

SEQ ID NO: 252 - protein, 9 aa, Artificial Sequence
  Artificially Synthesized Peptide
GILYKRETT

SEQ ID NO: 253 - protein, 9 aa, Artificial Sequence
  Artificially Synthesized Peptide
GLCQVFADA

SEQ ID NO: 254 - protein, 10 aa, Artificial Sequence
  Artificially Synthesized Peptide
GLCQVFADAT

SEQ ID NO: 255 - protein, 10 aa, Artificial Sequence
  Artificially Synthesized Peptide
GLLGFAAPFT

SEQ ID NO: 256 - protein, 9 aa, Artificial Sequence
  Artificially Synthesized Peptide
GLLGWSPQA

SEQ ID NO: 257 - protein, 10 aa, Artificial Sequence
  Artificially Synthesized Peptide
GLPVCAFSSA

SEQ ID NO: 258 - protein, 8 aa, Artificial Sequence
  Artificially Synthesized Peptide
GLSPFLLA

SEQ ID NO: 259 - protein, 11 aa, Artificial Sequence
  Artificially Synthesized Peptide
GLSPFLLAQFT

SEQ ID NO: 260 - protein, 8 aa, Artificial Sequence
  Artificially Synthesized Peptide
GLSPTVWL

SEQ ID NO: 261 - protein, 10 aa, Artificial Sequence
  Artificially Synthesized Peptide
GLSPTVWLSV

SEQ ID NO: 262 - protein, 11 aa, Artificial Sequence
  Artificially Synthesized Peptide
GLSPTVWLSVI

SEQ ID NO: 263 - protein, 8 aa, Artificial Sequence
  Artificially Synthesized Peptide
GMLPVCPL

SEQ ID NO: 264 - protein, 8 aa, Artificial Sequence
  Artificially Synthesized Peptide
GTDNSVVL

SEQ ID NO: 265 - protein, 10 aa, Artificial Sequence
  Artificially Synthesized Peptide
GTNLSVPNPL

SEQ ID NO: 266 - protein, 10 aa, Artificial Sequence
  Artificially Synthesized Peptide
GTSFVYVPSA

SEQ ID NO: 267 - protein, 11 aa, Artificial Sequence
  Artificially Synthesized Peptide
GTSFVYVPSAL

SEQ ID NO: 268 - protein, 8 aa, Artificial Sequence
  Artificially Synthesized Peptide
GVGLSPFL

SEQ ID NO: 269 - protein, 9 aa, Artificial Sequence
  Artificially Synthesized Peptide
GVGLSPFLL

SEQ ID NO: 270 - protein, 10 aa, Artificial Sequence
  Artificially Synthesized Peptide
GVGLSPFLLA

SEQ ID NO: 271 - protein, 9 aa, Artificial Sequence
  Artificially Synthesized Peptide
GVWIRTPPA

SEQ ID NO: 272 - protein, 11 aa, Artificial Sequence
  Artificially Synthesized Peptide
HISCLTFGRET

SEQ ID NO: 273 - protein, 9 aa, Artificial Sequence
  Artificially Synthesized Peptide
HLLVGSSGL

SEQ ID NO: 274 - protein, 9 aa, Artificial Sequence
  Artificially Synthesized Peptide
HLSLRGLPV

SEQ ID NO: 275 - protein, 11 aa, Artificial Sequence
  Artificially Synthesized Peptide
HLSLRGLPVCA

SEQ ID NO: 276 - protein, 8 aa, Artificial Sequence
  Artificially Synthesized Peptide
HLYSHPII

SEQ ID NO: 277 - protein, 9 aa, Artificial Sequence
  Artificially Synthesized Peptide
HLYSHPIIL

SEQ ID NO: 278 - protein, 8 aa, Artificial Sequence
  Artificially Synthesized Peptide
HTAELLAA

SEQ ID NO: 279 - protein, 11 aa, Artificial Sequence
  Artificially Synthesized Peptide
HTAELLAACFA

SEQ ID NO: 280 - protein, 8 aa, Artificial Sequence
  Artificially Synthesized Peptide
HTALRQAI

SEQ ID NO: 281 - protein, 9 aa, Artificial Sequence
  Artificially Synthesized Peptide
HTALRQAIL

SEQ ID NO: 282 - protein, 8 aa, Artificial Sequence
  Artificially Synthesized Peptide
HTLWKAGI

SEQ ID NO: 283 - protein, 9 aa, Artificial Sequence
  Artificially Synthesized Peptide
HTLWKAGIL

SEQ ID NO: 284 - protein, 8 aa, Artificial Sequence
  Artificially Synthesized Peptide
IIFLFILL

SEQ ID NO: 285 - protein, 9 aa, Artificial Sequence
  Artificially Synthesized Peptide
IIFLFILLL

SEQ ID NO: 286 - protein, 11 aa, Artificial Sequence
  Artificially Synthesized Peptide
IIFLFILLLCL

SEQ ID NO: 287 - protein, 8 aa, Artificial Sequence
  Artificially Synthesized Peptide
IILGFRKI

SEQ ID NO: 288 - protein, 10 aa, Artificial Sequence
  Artificially Synthesized Peptide
IILGFRKIPM

SEQ ID NO: 289 - protein, 8 aa, Artificial Sequence
  Artificially Synthesized Peptide
ILCWGELM

SEQ ID NO: 290 - protein, 9 aa, Artificial Sequence
  Artificially Synthesized Peptide
ILGFRKIPM

SEQ ID NO: 291 - protein, 9 aa, Artificial Sequence
  Artificially Synthesized Peptide
ILLLCLIFL

SEQ ID NO: 292 - protein, 10 aa, Artificial Sequence
  Artificially Synthesized Peptide
ILLLCLIFLL

SEQ ID NO: 293 - protein, 11 aa, Artificial Sequence
  Artificially Synthesized Peptide
ILLLCLIFLLV

SEQ ID NO: 294 - protein, 8 aa, Artificial Sequence
  Artificially Synthesized Peptide
ILRGTSFV

SEQ ID NO: 295 - protein, 10 aa, Artificial Sequence
  Artificially Synthesized Peptide
ILRGTSFVYV

SEQ ID NO: 296 - protein, 8 aa, Artificial Sequence
  Artificially Synthesized Peptide
ILSTLPET

SEQ ID NO: 297 - protein, 9 aa, Artificial Sequence
  Artificially Synthesized Peptide
ILSTLPETT

SEQ ID NO: 298 - protein, 10 aa, Artificial Sequence
  Artificially Synthesized Peptide
ILSTLPETTV

SEQ ID NO: 299 - protein, 11 aa, Artificial Sequence
  Artificially Synthesized Peptide
ILSTLPETTVV

SEQ ID NO: 300 - protein, 8 aa, Artificial Sequence
  Artificially Synthesized Peptide
ILTIPQSL

SEQ ID NO: 301 - protein, 8 aa, Artificial Sequence
  Artificially Synthesized Peptide
ILYKRETT

SEQ ID NO: 302 - protein, 8 aa, Artificial Sequence
  Artificially Synthesized Peptide
IVGLLGFA

SEQ ID NO: 303 - protein, 9 aa, Artificial Sequence
  Artificially Synthesized Peptide
IVGLLGFAA

SEQ ID NO: 304 - protein, 10 aa, Artificial Sequence
  Artificially Synthesized Peptide
KAGILYKRET

SEQ ID NO: 305 - protein, 11 aa, Artificial Sequence
  Artificially Synthesized Peptide
KAGILYKRETT

SEQ ID NO: 306 - protein, 8 aa, Artificial Sequence
  Artificially Synthesized Peptide
KIPMGVGL

SEQ ID NO: 307 - protein, 10 aa, Artificial Sequence
  Artificially Synthesized Peptide
KLCLGWLWGM

SEQ ID NO: 308 - protein, 9 aa, Artificial Sequence
  Artificially Synthesized Peptide
KLHLYSHPI

SEQ ID NO: 309 - protein, 10 aa, Artificial Sequence
  Artificially Synthesized Peptide
KLHLYSHPII

SEQ ID NO: 310 - protein, 11 aa, Artificial Sequence
  Artificially Synthesized Peptide
KLHLYSHPIIL

SEQ ID NO: 311 - protein, 8 aa, Artificial Sequence
  Artificially Synthesized Peptide
KLPVNRPI

SEQ ID NO: 312 - protein, 9 aa, Artificial Sequence
  Artificially Synthesized Peptide
KQAFTFSPT

SEQ ID NO: 313 - protein, 9 aa, Artificial Sequence
  Artificially Synthesized Peptide
KTKRWGYSL

SEQ ID NO: 314 - protein, 9 aa, Artificial Sequence
  Artificially Synthesized Peptide
KVCQRIVGL

SEQ ID NO: 315 - protein, 10 aa, Artificial Sequence
  Artificially Synthesized Peptide
KVCQRIVGLL

SEQ ID NO: 316 - protein, 8 aa, Artificial Sequence
  Artificially Synthesized Peptide
KVGNFTGL

SEQ ID NO: 317 - protein, 8 aa, Artificial Sequence
  Artificially Synthesized Peptide
KVLHKRTL

SEQ ID NO: 318 - protein, 10 aa, Artificial Sequence
  Artificially Synthesized Peptide
KVLHKRTLGL

SEQ ID NO: 319 - protein, 9 aa, Artificial Sequence
  Artificially Synthesized Peptide
LAFSYMDDV

SEQ ID NO: 320 - protein, 10 aa, Artificial Sequence
  Artificially Synthesized Peptide
LAFSYMDDVV

SEQ ID NO: 321 - protein, 11 aa, Artificial Sequence
  Artificially Synthesized Peptide
LAFSYMDDVVL

SEQ ID NO: 322 - protein, 8 aa, Artificial Sequence
  Artificially Synthesized Peptide
LAQFTSAI

SEQ ID NO: 323 - protein, 11 aa, Artificial Sequence
  Artificially Synthesized Peptide
LAQFTSAICSV

SEQ ID NO: 324 - protein, 8 aa, Artificial Sequence
  Artificially Synthesized Peptide
LIFLLVLL

SEQ ID NO: 325 - protein, 8 aa, Artificial Sequence
  Artificially Synthesized Peptide
LLAQFTSA

SEQ ID NO: 326 - protein, 9 aa, Artificial Sequence
  Artificially Synthesized Peptide
LLAQFTSAI

SEQ ID NO: 327 - protein, 8 aa, Artificial Sequence
  Artificially Synthesized Peptide
LLCLIFLL

SEQ ID NO: 328 - protein, 9 aa, Artificial Sequence
  Artificially Synthesized Peptide
LLCLIFLLV

SEQ ID NO: 329 - protein, 10 aa, Artificial Sequence
  Artificially Synthesized Peptide
LLCLIFLLVL

SEQ ID NO: 330 - protein, 11 aa, Artificial Sequence
  Artificially Synthesized Peptide
LLCLIFLLVLL

SEQ ID NO: 331 - protein, 8 aa, Artificial Sequence
  Artificially Synthesized Peptide
LLDTASAL

SEQ ID NO: 332 - protein, 8 aa, Artificial Sequence
  Artificially Synthesized Peptide
LLDYQGML

SEQ ID NO: 333 - protein, 10 aa, Artificial Sequence
  Artificially Synthesized Peptide
LLDYQGMLPV

SEQ ID NO: 334 - protein, 9 aa, Artificial Sequence
  Artificially Synthesized Peptide
LLGCAANWI

SEQ ID NO: 335 - protein, 10 aa, Artificial Sequence
  Artificially Synthesized Peptide
LLGCAANWIL

SEQ ID NO: 336 - protein, 9 aa, Artificial Sequence
  Artificially Synthesized Peptide
LLGFAAPFT

SEQ ID NO: 337 - protein, 8 aa, Artificial Sequence
  Artificially Synthesized Peptide
LLGWSPQA

SEQ ID NO: 338 - protein, 11 aa, Artificial Sequence
  Artificially Synthesized Peptide
LLGWSPQAQGI

SEQ ID NO: 339 - protein, 8 aa, Artificial Sequence
  Artificially Synthesized Peptide
LLLCLIFL

SEQ ID NO: 340 - protein, 9 aa, Artificial Sequence
  Artificially Synthesized Peptide
LLLCLIFLL

SEQ ID NO: 341 - protein, 10 aa, Artificial Sequence
  Artificially Synthesized Peptide
LLLCLIFLLV

SEQ ID NO: 342 - protein, 11 aa, Artificial Sequence
  Artificially Synthesized Peptide
LLLCLIFLLVL

SEQ ID NO: 343 - protein, 8 aa, Artificial Sequence
  Artificially Synthesized Peptide
LLPIFFCL

SEQ ID NO: 344 - protein, 10 aa, Artificial Sequence
  Artificially Synthesized Peptide
LLPIFFCLWV

SEQ ID NO: 345 - protein, 8 aa, Artificial Sequence
  Artificially Synthesized Peptide
LLSLGIHL

SEQ ID NO: 346 - protein, 9 aa, Artificial Sequence
  Artificially Synthesized Peptide
LLSSNLSWL

SEQ ID NO: 347 - protein, 11 aa, Artificial Sequence
  Artificially Synthesized Peptide
LLSSNLSWLSL

SEQ ID NO: 348 - protein, 8 aa, Artificial Sequence
  Artificially Synthesized Peptide
LLTRILTI

SEQ ID NO: 349 - protein, 8 aa, Artificial Sequence
  Artificially Synthesized Peptide
LLVGSSGL

SEQ ID NO: 350 - protein, 10 aa, Artificial Sequence
  Artificially Synthesized Peptide
LLVLLDYQGM

SEQ ID NO: 351 - protein, 11 aa, Artificial Sequence
  Artificially Synthesized Peptide
LLVLLDYQGML

SEQ ID NO: 352 - protein, 10 aa, Artificial Sequence
  Artificially Synthesized Peptide
LLVLQAGFFL

SEQ ID NO: 353 - protein, 11 aa, Artificial Sequence
  Artificially Synthesized Peptide
LLVLQAGFFLL

SEQ ID NO: 354 - protein, 10 aa, Artificial Sequence
  Artificially Synthesized Peptide
LLVPFVQWFV

SEQ ID NO: 355 - protein, 9 aa, Artificial Sequence
  Artificially Synthesized Peptide
LLWFHISCL

SEQ ID NO: 356 - protein, 10 aa, Artificial Sequence
  Artificially Synthesized Peptide
LLWFHISCLT

SEQ ID NO: 357 - protein, 8 aa, Artificial Sequence
  Artificially Synthesized Peptide
LMPLYACI

SEQ ID NO: 358 - protein, 8 aa, Artificial Sequence
  Artificially Synthesized Peptide
LQAGFFLL

SEQ ID NO: 359 - protein, 9 aa, Artificial Sequence
  Artificially Synthesized Peptide
LQAGFFLLT

SEQ ID NO: 360 - protein, 11 aa, Artificial Sequence
  Artificially Synthesized Peptide
LQAGFFLLTRI

SEQ ID NO: 361 - protein, 8 aa, Artificial Sequence
  Artificially Synthesized Peptide
LQSLTNLL

SEQ ID NO: 362 - protein, 8 aa, Artificial Sequence
  Artificially Synthesized Peptide
LTFGRETV

SEQ ID NO: 363 - protein, 9 aa, Artificial Sequence
  Artificially Synthesized Peptide
LTFGRETVL

SEQ ID NO: 364 - protein, 9 aa, Artificial Sequence
  Artificially Synthesized Peptide
LTNLLSSNL

SEQ ID NO: 365 - protein, 11 aa, Artificial Sequence
  Artificially Synthesized Peptide
LTRILTIPQSL

SEQ ID NO: 366 - protein, 9 aa, Artificial Sequence
  Artificially Synthesized Peptide
LTVNEKRRL

SEQ ID NO: 367 - protein, 9 aa, Artificial Sequence
  Artificially Synthesized Peptide
LVDKNPHNT

SEQ ID NO: 368 - protein, 9 aa, Artificial Sequence
  Artificially Synthesized Peptide
LVLLDYQGM

SEQ ID NO: 369 - protein, 10 aa, Artificial Sequence
  Artificially Synthesized Peptide
LVLLDYQGML

SEQ ID NO: 370 - protein, 9 aa, Artificial Sequence
  Artificially Synthesized Peptide
LVLQAGFFL

SEQ ID NO: 371 - protein, 10 aa, Artificial Sequence
  Artificially Synthesized Peptide
LVLQAGFFLL

SEQ ID NO: 372 - protein, 11 aa, Artificial Sequence
  Artificially Synthesized Peptide
LVLQAGFFLLT

SEQ ID NO: 373 - protein, 9 aa, Artificial Sequence
  Artificially Synthesized Peptide
LVPFVQWFV

SEQ ID NO: 374 - protein, 11 aa, Artificial Sequence
  Artificially Synthesized Peptide
LVPFVQWFVGL

SEQ ID NO: 375 - protein, 8 aa, Artificial Sequence
  Artificially Synthesized Peptide
LVSFGVWI

SEQ ID NO: 376 - protein, 10 aa, Artificial Sequence
  Artificially Synthesized Peptide
LVSFGVWIRT

SEQ ID NO: 377 - protein, 9 aa, Artificial Sequence
  Artificially Synthesized Peptide
MMWYWGPSL

SEQ ID NO: 378 - protein, 8 aa, Artificial Sequence
  Artificially Synthesized Peptide
MQLFHLCL

SEQ ID NO: 379 - protein, 8 aa, Artificial Sequence
  Artificially Synthesized Peptide
NAPILSTL

SEQ ID NO: 380 - protein, 11 aa, Artificial Sequence
  Artificially Synthesized Peptide
NAPILSTLPET

SEQ ID NO: 381 - protein, 9 aa, Artificial Sequence
  Artificially Synthesized Peptide
NLGNLNVSI

SEQ ID NO: 382 - protein, 10 aa, Artificial Sequence
  Artificially Synthesized Peptide
NLLSSNLSWL

SEQ ID NO: 383 - protein, 9 aa, Artificial Sequence
  Artificially Synthesized Peptide
NLNVSIPWT

SEQ ID NO: 384 - protein, 8 aa, Artificial Sequence
  Artificially Synthesized Peptide
NLQSLTNL

SEQ ID NO: 385 - protein, 9 aa, Artificial Sequence
  Artificially Synthesized Peptide
NLQSLTNLL

SEQ ID NO: 386 - protein, 8 aa, Artificial Sequence
  Artificially Synthesized Peptide
NLSVPNPL

SEQ ID NO: 387 - protein, 9 aa, Artificial Sequence
  Artificially Synthesized Peptide
NLSWLSLDV

SEQ ID NO: 388 - protein, 11 aa, Artificial Sequence
  Artificially Synthesized Peptide
NLSWLSLDVSA

SEQ ID NO: 389 - protein, 10 aa, Artificial Sequence
  Artificially Synthesized Peptide
NVSIPWTHKV

SEQ ID NO: 390 - protein, 8 aa, Artificial Sequence
  Artificially Synthesized Peptide
PAAMPHLL

SEQ ID NO: 391 - protein, 9 aa, Artificial Sequence
  Artificially Synthesized Peptide
PAAMPHLLV

SEQ ID NO: 392 - protein, 10 aa, Artificial Sequence
  Artificially Synthesized Peptide
PADDPSRGRL

SEQ ID NO: 393 - protein, 9 aa, Artificial Sequence
  Artificially Synthesized Peptide
PAGGSSSGT

SEQ ID NO: 394 - protein, 10 aa, Artificial Sequence
  Artificially Synthesized Peptide
PAGGSSSGTV

SEQ ID NO: 395 - protein, 8 aa, Artificial Sequence
  Artificially Synthesized Peptide
PALMPLYA

SEQ ID NO: 396 - protein, 10 aa, Artificial Sequence
  Artificially Synthesized Peptide
PALMPLYACI

SEQ ID NO: 397 - protein, 8 aa, Artificial Sequence
  Artificially Synthesized Peptide
PAPCNFFT

SEQ ID NO: 398 - protein, 10 aa, Artificial Sequence
  Artificially Synthesized Peptide
PAPCNFFTSA

SEQ ID NO: 399 - protein, 8 aa, Artificial Sequence
  Artificially Synthesized Peptide
PARDVLCL

SEQ ID NO: 400 - protein, 11 aa, Artificial Sequence
  Artificially Synthesized Peptide
PARDVLCLRPV

SEQ ID NO: 401 - protein, 8 aa, Artificial Sequence
  Artificially Synthesized Peptide
PARVTGGV

SEQ ID NO: 402 - protein, 10 aa, Artificial Sequence
  Artificially Synthesized Peptide
PARVTGGVFL

SEQ ID NO: 403 - protein, 11 aa, Artificial Sequence
  Artificially Synthesized Peptide
PARVTGGVFLV

SEQ ID NO: 404 - protein, 8 aa, Artificial Sequence
  Artificially Synthesized Peptide
PAYRPPNA

SEQ ID NO: 405 - protein, 10 aa, Artificial Sequence
  Artificially Synthesized Peptide
PAYRPPNAPI

SEQ ID NO: 406 - protein, 11 aa, Artificial Sequence
  Artificially Synthesized Peptide
PAYRPPNAPIL

SEQ ID NO: 407 - protein, 10 aa, Artificial Sequence
  Artificially Synthesized Peptide
PIDWKVCQRI

SEQ ID NO: 408 - protein, 11 aa, Artificial Sequence
  Artificially Synthesized Peptide
PIDWKVCQRIV

SEQ ID NO: 409 - protein, 8 aa, Artificial Sequence
  Artificially Synthesized Peptide
PIFFCLWV

SEQ ID NO: 410 - protein, 10 aa, Artificial Sequence
  Artificially Synthesized Peptide
PIFFCLWVYI

SEQ ID NO: 411 - protein, 8 aa, Artificial Sequence
  Artificially Synthesized Peptide
PIHTAELL

SEQ ID NO: 412 - protein, 9 aa, Artificial Sequence
  Artificially Synthesized Peptide
PIHTAELLA

SEQ ID NO: 413 - protein, 10 aa, Artificial Sequence
  Artificially Synthesized Peptide
PIHTAELLAA

SEQ ID NO: 414 - protein, 9 aa, Artificial Sequence
  Artificially Synthesized Peptide
PIILGFRKI

SEQ ID NO: 415 - protein, 11 aa, Artificial Sequence
  Artificially Synthesized Peptide
PIILGFRKIPM

SEQ ID NO: 416 - protein, 9 aa, Artificial Sequence
  Artificially Synthesized Peptide
PILSTLPET

SEQ ID NO: 417 - protein, 10 aa, Artificial Sequence
  Artificially Synthesized Peptide
PILSTLPETT

SEQ ID NO: 418 - protein, 11 aa, Artificial Sequence
  Artificially Synthesized Peptide
PILSTLPETTV

SEQ ID NO: 419 - protein, 9 aa, Artificial Sequence
  Artificially Synthesized Peptide
PIPSSWAFA

SEQ ID NO: 420 - protein, 9 aa, Artificial Sequence
  Artificially Synthesized Peptide
PLEEELPRL

SEQ ID NO: 421 - protein, 10 aa, Artificial Sequence
  Artificially Synthesized Peptide
PLEEELPRLA

SEQ ID NO: 422 - protein, 10 aa, Artificial Sequence
  Artificially Synthesized Peptide
PLGFFPDHQL

SEQ ID NO: 423 - protein, 10 aa, Artificial Sequence
  Artificially Synthesized Peptide
PLHPAAMPHL

SEQ ID NO: 424 - protein, 11 aa, Artificial Sequence
  Artificially Synthesized Peptide
PLHPAAMPHLL

SEQ ID NO: 425 - protein, 9 aa, Artificial Sequence
  Artificially Synthesized Peptide
PLLPIFFCL

SEQ ID NO: 426 - protein, 11 aa, Artificial Sequence
  Artificially Synthesized Peptide
PLLPIFFCLWV

SEQ ID NO: 427 - protein, 11 aa, Artificial Sequence
  Artificially Synthesized Peptide
PLLVLQAGFFL

SEQ ID NO: 428 - protein, 9 aa, Artificial Sequence
  Artificially Synthesized Peptide
PLPIHTAEL

SEQ ID NO: 429 - protein, 10 aa, Artificial Sequence
  Artificially Synthesized Peptide
PLPIHTAELL

SEQ ID NO: 430 - protein, 11 aa, Artificial Sequence
  Artificially Synthesized Peptide
PLPIHTAELLA

SEQ ID NO: 431 - protein, 10 aa, Artificial Sequence
  Artificially Synthesized Peptide
PLSYQHFRKL

SEQ ID NO: 432 - protein, 11 aa, Artificial Sequence
  Artificially Synthesized Peptide
PLSYQHFRKLL

SEQ ID NO: 433 - protein, 10 aa, Artificial Sequence
  Artificially Synthesized Peptide
PLTVNEKRRL

SEQ ID NO: 434 - protein, 10 aa, Artificial Sequence
  Artificially Synthesized Peptide
PMGVGLSPFL

SEQ ID NO: 435 - protein, 11 aa, Artificial Sequence
  Artificially Synthesized Peptide
PMGVGLSPFLL

SEQ ID NO: 436 - protein, 9 aa, Artificial Sequence
  Artificially Synthesized Peptide
PQAMQWNST

SEQ ID NO: 437 - protein, 10 aa, Artificial Sequence
  Artificially Synthesized Peptide
PQAMQWNSTT

SEQ ID NO: 438 - protein, 9 aa, Artificial Sequence
  Artificially Synthesized Peptide
PQSLDSWWT

SEQ ID NO: 439 - protein, 11 aa, Artificial Sequence
  Artificially Synthesized Peptide
PQSLDSWWTSL

SEQ ID NO: 440 - protein, 8 aa, Artificial Sequence
  Artificially Synthesized Peptide
PTGWGLAI

SEQ ID NO: 441 - protein, 8 aa, Artificial Sequence
  Artificially Synthesized Peptide
PTSNHSPT

SEQ ID NO: 442 - protein, 8 aa, Artificial Sequence
  Artificially Synthesized Peptide
PTTGRTSL

SEQ ID NO: 443 - protein, 10 aa, Artificial Sequence
  Artificially Synthesized Peptide
PTTGRTSLYA

SEQ ID NO: 444 - protein, 8 aa, Artificial Sequence
  Artificially Synthesized Peptide
PTVQASKL

SEQ ID NO: 445 - protein, 10 aa, Artificial Sequence
  Artificially Synthesized Peptide
PTVQASKLCL

SEQ ID NO: 446 - protein, 8 aa, Artificial Sequence
  Artificially Synthesized Peptide
PTVWLSVI

SEQ ID NO: 447 - protein, 10 aa, Artificial Sequence
  Artificially Synthesized Peptide
PTVWLSVIWM

SEQ ID NO: 448 - protein, 8 aa, Artificial Sequence
  Artificially Synthesized Peptide
PVCAFSSA

SEQ ID NO: 449 - protein, 10 aa, Artificial Sequence
  Artificially Synthesized Peptide
PVNRPIDWKV

SEQ ID NO: 450 - protein, 8 aa, Artificial Sequence
  Artificially Synthesized Peptide
QAFTFSPT

SEQ ID NO: 451 - protein, 11 aa, Artificial Sequence
  Artificially Synthesized Peptide
QAFTFSPTYKA

SEQ ID NO: 452 - protein, 8 aa, Artificial Sequence
  Artificially Synthesized Peptide
QAGFFLLT

SEQ ID NO: 453 - protein, 10 aa, Artificial Sequence
  Artificially Synthesized Peptide
QAGFFLLTRI

SEQ ID NO: 454 - protein, 11 aa, Artificial Sequence
  Artificially Synthesized Peptide
QAGFFLLTRIL

SEQ ID NO: 455 - protein, 9 aa, Artificial Sequence
  Artificially Synthesized Peptide
QAILCWGEL

SEQ ID NO: 456 - protein, 10 aa, Artificial Sequence
  Artificially Synthesized Peptide
QAILCWGELM

SEQ ID NO: 457 - protein, 8 aa, Artificial Sequence
  Artificially Synthesized Peptide
QAMQWNST

SEQ ID NO: 458 - protein, 9 aa, Artificial Sequence
  Artificially Synthesized Peptide
QAMQWNSTT

SEQ ID NO: 459 - protein, 10 aa, Artificial Sequence
  Artificially Synthesized Peptide
QASKLCLGWL

SEQ ID NO: 460 - protein, 8 aa, Artificial Sequence
  Artificially Synthesized Peptide
QLDPARDV

SEQ ID NO: 461 - protein, 9 aa, Artificial Sequence
  Artificially Synthesized Peptide
QLDPARDVL

SEQ ID NO: 462 - protein, 11 aa, Artificial Sequence
  Artificially Synthesized Peptide
QLDPARDVLCL

SEQ ID NO: 463 - protein, 10 aa, Artificial Sequence
  Artificially Synthesized Peptide
QLLWFHISCL

SEQ ID NO: 464 - protein, 11 aa, Artificial Sequence
  Artificially Synthesized Peptide
QLLWFHISCLT

SEQ ID NO: 465 - protein, 9 aa, Artificial Sequence
  Artificially Synthesized Peptide
QVFADATPT

SEQ ID NO: 466 - protein, 8 aa, Artificial Sequence
  Artificially Synthesized Peptide
RAFPHCLA

SEQ ID NO: 467 - protein, 9 aa, Artificial Sequence
  Artificially Synthesized Peptide
RILTIPQSL

SEQ ID NO: 468 - protein, 9 aa, Artificial Sequence
  Artificially Synthesized Peptide
RIVGLLGFA

SEQ ID NO: 469 - protein, 10 aa, Artificial Sequence
  Artificially Synthesized Peptide
RIVGLLGFAA

SEQ ID NO: 470 - protein, 8 aa, Artificial Sequence
  Artificially Synthesized Peptide
RLKLIMPA

SEQ ID NO: 471 - protein, 10 aa, Artificial Sequence
  Artificially Synthesized Peptide
RQAILCWGEL

SEQ ID NO: 472 - protein, 11 aa, Artificial Sequence
  Artificially Synthesized Peptide
RQAILCWGELM

SEQ ID NO: 473 - protein, 8 aa, Artificial Sequence
  Artificially Synthesized Peptide
RQLLWFHI

SEQ ID NO: 474 - protein, 11 aa, Artificial Sequence
  Artificially Synthesized Peptide
RQLLWFHISCL

SEQ ID NO: 475 - protein, 8 aa, Artificial Sequence
  Artificially Synthesized Peptide
RQSGRQPT

SEQ ID NO: 476 - protein, 10 aa, Artificial Sequence
  Artificially Synthesized Peptide
RTPARVTGGV

SEQ ID NO: 477 - protein, 11 aa, Artificial Sequence
  Artificially Synthesized Peptide
RTPPAYRPPNA

SEQ ID NO: 478 - protein, 8 aa, Artificial Sequence
  Artificially Synthesized Peptide
RVAEDLNL

SEQ ID NO: 479 - protein, 11 aa, Artificial Sequence
  Artificially Synthesized Peptide
RVAEDLNLGNL

SEQ ID NO: 480 - protein, 8 aa, Artificial Sequence
  Artificially Synthesized Peptide
RVHFASPL

SEQ ID NO: 481 - protein, 10 aa, Artificial Sequence
  Artificially Synthesized Peptide
RVHFASPLHV

SEQ ID NO: 482 - protein, 11 aa, Artificial Sequence
  Artificially Synthesized Peptide
RVHFASPLHVA

SEQ ID NO: 483 - protein, 8 aa, Artificial Sequence
  Artificially Synthesized Peptide
RVTGGVFL

SEQ ID NO: 484 - protein, 9 aa, Artificial Sequence
  Artificially Synthesized Peptide
RVTGGVFLV

SEQ ID NO: 485 - protein, 10 aa, Artificial Sequence
  Artificially Synthesized Peptide
SAGPCALRFT

SEQ ID NO: 486 - protein, 10 aa, Artificial Sequence
  Artificially Synthesized Peptide
SAICSVVRRA

SEQ ID NO: 487 - protein, 8 aa, Artificial Sequence
  Artificially Synthesized Peptide
SALYREAL

SEQ ID NO: 488 - protein, 8 aa, Artificial Sequence
  Artificially Synthesized Peptide
SIPWTHKV

SEQ ID NO: 489 - protein, 9 aa, Artificial Sequence
  Artificially Synthesized Peptide
SLDSWWTSL

SEQ ID NO: 490 - protein, 11 aa, Artificial Sequence
  Artificially Synthesized Peptide
SLGIHLNPNKT

SEQ ID NO: 491 - protein, 11 aa, Artificial Sequence
  Artificially Synthesized Peptide
SLLVPFVQWFV

SEQ ID NO: 492 - protein, 8 aa, Artificial Sequence
  Artificially Synthesized Peptide
SLNFMGYV

SEQ ID NO: 493 - protein, 9 aa, Artificial Sequence
  Artificially Synthesized Peptide
SLNFMGYVI

SEQ ID NO: 494 - protein, 9 aa, Artificial Sequence
  Artificially Synthesized Peptide
SLRGLPVCA

SEQ ID NO: 495 - protein, 10 aa, Artificial Sequence
  Artificially Synthesized Peptide
SLTNLLSSNL

SEQ ID NO: 496 - protein, 11 aa, Artificial Sequence
  Artificially Synthesized Peptide
SQSPTSNHSPT

SEQ ID NO: 497 - protein, 9 aa, Artificial Sequence
  Artificially Synthesized Peptide
STGPCKTCT

SEQ ID NO: 498 - protein, 8 aa, Artificial Sequence
  Artificially Synthesized Peptide
STLPETTV

SEQ ID NO: 499 - protein, 9 aa, Artificial Sequence
  Artificially Synthesized Peptide
STLPETTVV

SEQ ID NO: 500 - protein, 11 aa, Artificial Sequence
  Artificially Synthesized Peptide
STNRQSGRQPT

SEQ ID NO: 501 - protein, 8 aa, Artificial Sequence
  Artificially Synthesized Peptide
SVQHLESL

SEQ ID NO: 502 - protein, 9 aa, Artificial Sequence
  Artificially Synthesized Peptide
SVRFSWLSL

SEQ ID NO: 503 - protein, 10 aa, Artificial Sequence
  Artificially Synthesized Peptide
SVRFSWLSLL

SEQ ID NO: 504 - protein, 11 aa, Artificial Sequence
  Artificially Synthesized Peptide
SVRFSWLSLLV

SEQ ID NO: 505 - protein, 9 aa, Artificial Sequence
  Artificially Synthesized Peptide
SVVLSRKYT

SEQ ID NO: 506 - protein, 11 aa, Artificial Sequence
  Artificially Synthesized Peptide
SVVRRAFPHCL

SEQ ID NO: 507 - protein, 10 aa, Artificial Sequence
  Artificially Synthesized Peptide
TAELLAACFA

SEQ ID NO: 508 - protein, 8 aa, Artificial Sequence
  Artificially Synthesized Peptide
TALRQAIL

SEQ ID NO: 509 - protein, 9 aa, Artificial Sequence
  Artificially Synthesized Peptide
TASALYREA

SEQ ID NO: 510 - protein, 10 aa, Artificial Sequence
  Artificially Synthesized Peptide
TASALYREAL

SEQ ID NO: 511 - protein, 11 aa, Artificial Sequence
  Artificially Synthesized Peptide
TIPQSLDSWWT

SEQ ID NO: 512 - protein, 8 aa, Artificial Sequence
  Artificially Synthesized Peptide
TLPETTVV

SEQ ID NO: 513 - protein, 8 aa, Artificial Sequence
  Artificially Synthesized Peptide
TLWKAGIL

SEQ ID NO: 514 - protein, 8 aa, Artificial Sequence
  Artificially Synthesized Peptide
TQCGYPAL

SEQ ID NO: 515 - protein, 9 aa, Artificial Sequence
  Artificially Synthesized Peptide
TQCGYPALM

SEQ ID NO: 516 - protein, 11 aa, Artificial Sequence
  Artificially Synthesized Peptide
TQCGYPALMPL

SEQ ID NO: 517 - protein, 9 aa, Artificial Sequence
  Artificially Synthesized Peptide
TTGRTSLYA

SEQ ID NO: 518 - protein, 9 aa, Artificial Sequence
  Artificially Synthesized Peptide
TTSTGPCKT

SEQ ID NO: 519 - protein, 11 aa, Artificial Sequence
  Artificially Synthesized Peptide
TTSTGPCKTCT

SEQ ID NO: 520 - protein, 8 aa, Artificial Sequence
  Artificially Synthesized Peptide
TVNEKRRL

SEQ ID NO: 521 - protein, 9 aa, Artificial Sequence
  Artificially Synthesized Peptide
TVQASKLCL

SEQ ID NO: 522 - protein, 9 aa, Artificial Sequence
  Artificially Synthesized Peptide
TVWLSVIWM

SEQ ID NO: 523 - protein, 10 aa, Artificial Sequence
  Artificially Synthesized Peptide
VAEDLNLGNL

SEQ ID NO: 524 - protein, 9 aa, Artificial Sequence
  Artificially Synthesized Peptide
VLCLRPVGA

SEQ ID NO: 525 - protein, 10 aa, Artificial Sequence
  Artificially Synthesized Peptide
VLGAKSVQHL

SEQ ID NO: 526 - protein, 9 aa, Artificial Sequence
  Artificially Synthesized Peptide
VLGGCRHKL

SEQ ID NO: 527 - protein, 10 aa, Artificial Sequence
  Artificially Synthesized Peptide
VLGGCRHKLV

SEQ ID NO: 528 - protein, 9 aa, Artificial Sequence
  Artificially Synthesized Peptide
VLHKRTLGL

SEQ ID NO: 529 - protein, 8 aa, Artificial Sequence
  Artificially Synthesized Peptide
VLLDYQGM

SEQ ID NO: 530 - protein, 9 aa, Artificial Sequence
  Artificially Synthesized Peptide
VLLDYQGML

SEQ ID NO: 531 - protein, 11 aa, Artificial Sequence
  Artificially Synthesized Peptide
VLLDYQGMLPV

SEQ ID NO: 532 - protein, 8 aa, Artificial Sequence
  Artificially Synthesized Peptide
VLQAGFFL

SEQ ID NO: 533 - protein, 9 aa, Artificial Sequence
  Artificially Synthesized Peptide
VLQAGFFLL

SEQ ID NO: 534 - protein, 10 aa, Artificial Sequence
  Artificially Synthesized Peptide
VLQAGFFLLT

SEQ ID NO: 535 - protein, 8 aa, Artificial Sequence
  Artificially Synthesized Peptide
VQASKLCL

SEQ ID NO: 536 - protein, 11 aa, Artificial Sequence
  Artificially Synthesized Peptide
VQASKLCLGWL

SEQ ID NO: 537 - protein, 10 aa, Artificial Sequence
  Artificially Synthesized Peptide
VQWFVGLSPT

SEQ ID NO: 538 - protein, 11 aa, Artificial Sequence
  Artificially Synthesized Peptide
VQWFVGLSPTV

SEQ ID NO: 539 - protein, 8 aa, Artificial Sequence
  Artificially Synthesized Peptide
VTGGVFLV

SEQ ID NO: 540 - protein, 8 aa, Artificial Sequence
  Artificially Synthesized Peptide
VVLGAKSV

SEQ ID NO: 541 - protein, 11 aa, Artificial Sequence
  Artificially Synthesized Peptide
VVLGAKSVQHL

SEQ ID NO: 542 - protein, 8 aa, Artificial Sequence
  Artificially Synthesized Peptide
VVLSRKYT

SEQ ID NO: 543 - protein, 10 aa, Artificial Sequence
  Artificially Synthesized Peptide
VVRRAFPHCL

SEQ ID NO: 544 - protein, 11 aa, Artificial Sequence
  Artificially Synthesized Peptide
VVRRAFPHCLA

SEQ ID NO: 545 - protein, 9 aa, Artificial Sequence
  Artificially Synthesized Peptide
WILRGTSFV

SEQ ID NO: 546 - protein, 11 aa, Artificial Sequence
  Artificially Synthesized Peptide
WILRGTSFVYV

SEQ ID NO: 547 - protein, 10 aa, Artificial Sequence
  Artificially Synthesized Peptide
WLLGCAANWI

SEQ ID NO: 548 - protein, 11 aa, Artificial Sequence
  Artificially Synthesized Peptide
WLLGCAANWIL

SEQ ID NO: 549 - protein, 8 aa, Artificial Sequence
  Artificially Synthesized Peptide
WLSLDVSA

SEQ ID NO: 550 - protein, 9 aa, Artificial Sequence
  Artificially Synthesized Peptide
WLSLDVSAA

SEQ ID NO: 551 - protein, 9 aa, Artificial Sequence
  Artificially Synthesized Peptide
WLSLLVPFV

SEQ ID NO: 552 - protein, 8 aa, Artificial Sequence
  Artificially Synthesized Peptide
WMCLRRFI

SEQ ID NO: 553 - protein, 9 aa, Artificial Sequence
  Artificially Synthesized Peptide
WMCLRRFII

SEQ ID NO: 554 - protein, 11 aa, Artificial Sequence
  Artificially Synthesized Peptide
WMCLRRFIIFL

SEQ ID NO: 555 - protein, 10 aa, Artificial Sequence
  Artificially Synthesized Peptide
WMMWYWGPSL

SEQ ID NO: 556 - protein, 9 aa, Artificial Sequence
  Artificially Synthesized Peptide
WTHKVGNFT

SEQ ID NO: 557 - protein, 11 aa, Artificial Sequence
  Artificially Synthesized Peptide
WTHKVGNFTGL

SEQ ID NO: 558 - protein, 8 aa, Artificial Sequence
  Artificially Synthesized Peptide
YLHTLWKA

SEQ ID NO: 559 - protein, 10 aa, Artificial Sequence
  Artificially Synthesized Peptide
YLHTLWKAGI

SEQ ID NO: 560 - protein, 11 aa, Artificial Sequence
  Artificially Synthesized Peptide
YLHTLWKAGIL

SEQ ID NO: 561 - protein, 8 aa, Artificial Sequence
  Artificially Synthesized Peptide
YLPLDKGI

SEQ ID NO: 562 - protein, 9 aa, Artificial Sequence
  Artificially Synthesized Peptide
YLVSFGVWI

SEQ ID NO: 563 - protein, 11 aa, Artificial Sequence
  Artificially Synthesized Peptide
YLVSFGVWIRT

SEQ ID NO: 564 - protein, 9 aa, Artificial Sequence
  Artificially Synthesized Peptide
YMDDVVLGA

SEQ ID NO: 565 - protein, 10 aa, Artificial Sequence
  Artificially Synthesized Peptide
YQGMLPVCPL

SEQ ID NO: 566 - protein, 8 aa, Artificial Sequence
  Artificially Synthesized Peptide
YQHFRKLL

SEQ ID NO: 567 - protein, 9 aa, Artificial Sequence
  Artificially Synthesized Peptide
YQHFRKLLL

SEQ ID NO: 568 - protein, 10 aa, Artificial Sequence
  Artificially Synthesized Peptide
YQHFRKLLLL

SEQ ID NO: 569 - protein, 8 aa, Artificial Sequence
  Artificially Synthesized Peptide
YTSFPWLL

SEQ ID NO: 570 - protein, 11 aa, Artificial Sequence
  Artificially Synthesized Peptide
YTSFPWLLGCA

SEQ ID NO: 571 - protein, 9 aa, Artificial Sequence
  Artificially Synthesized Peptide
YVPSALNPA

SEQ ID NO: 572 - protein, 8 aa, Artificial Sequence
  Artificially Synthesized Peptide
AACFARSR

SEQ ID NO: 573 - protein, 8 aa, Artificial Sequence
  Artificially Synthesized Peptide
AICSVVRR

SEQ ID NO: 574 - protein, 10 aa, Artificial Sequence
  Artificially Synthesized Peptide
ALNPADDPSR

SEQ ID NO: 575 - protein, 8 aa, Artificial Sequence
  Artificially Synthesized Peptide
ALRFTSAR

SEQ ID NO: 576 - protein, 9 aa, Artificial Sequence
  Artificially Synthesized Peptide
ASPLHVAWR

SEQ ID NO: 577 - protein, 9 aa, Artificial Sequence
  Artificially Synthesized Peptide
ASTNRQSGR

SEQ ID NO: 578 - protein, 8 aa, Artificial Sequence
  Artificially Synthesized Peptide
CAANWILR

SEQ ID NO: 579 - protein, 9 aa, Artificial Sequence
  Artificially Synthesized Peptide
CALRFTSAR

SEQ ID NO: 580 - protein, 10 aa, Artificial Sequence
  Artificially Synthesized Peptide
CLRPVGAESR

SEQ ID NO: 581 - protein, 9 aa, Artificial Sequence
  Artificially Synthesized Peptide
CSPHHTALR

SEQ ID NO: 582 - protein, 11 aa, Artificial Sequence
  Artificially Synthesized Peptide
DLLDTASALYR

SEQ ID NO: 583 - protein, 8 aa, Artificial Sequence
  Artificially Synthesized Peptide
DTASALYR

SEQ ID NO: 584 - protein, 11 aa, Artificial Sequence
  Artificially Synthesized Peptide
EAGPLEEELPR

SEQ ID NO: 585 - protein, 9 aa, Artificial Sequence
  Artificially Synthesized Peptide
ELLAACFAR

SEQ ID NO: 586 - protein, 11 aa, Artificial Sequence
  Artificially Synthesized Peptide
ELLAACFARSR

SEQ ID NO: 587 - protein, 8 aa, Artificial Sequence
  Artificially Synthesized Peptide
ETTVVRRR

SEQ ID NO: 588 - protein, 10 aa, Artificial Sequence
  Artificially Synthesized Peptide
ETTVVRRRGR

SEQ ID NO: 589 - protein, 10 aa, Artificial Sequence
  Artificially Synthesized Peptide
FASPLHVAWR

SEQ ID NO: 590 - protein, 10 aa, Artificial Sequence
  Artificially Synthesized Peptide
FSSAGPCALR

SEQ ID NO: 591 - protein, 8 aa, Artificial Sequence
  Artificially Synthesized Peptide
FTFSPTYK

SEQ ID NO: 592 - protein, 10 aa, Artificial Sequence
  Artificially Synthesized Peptide
FTSAICSVVR

SEQ ID NO: 593 - protein, 11 aa, Artificial Sequence
  Artificially Synthesized Peptide
FTSAICSVVRR

SEQ ID NO: 594 - protein, 9 aa, Artificial Sequence
  Artificially Synthesized Peptide
FVLGGCRHK

SEQ ID NO: 595 - protein, 8 aa, Artificial Sequence
  Artificially Synthesized Peptide
GIHLNPNK

SEQ ID NO: 596 - protein, 10 aa, Artificial Sequence
  Artificially Synthesized Peptide
GIHLNPNKTK

SEQ ID NO: 597 - protein, 11 aa, Artificial Sequence
  Artificially Synthesized Peptide
GIHLNPNKTKR

SEQ ID NO: 598 - protein, 8 aa, Artificial Sequence
  Artificially Synthesized Peptide
GMDIDPYK

SEQ ID NO: 599 - protein, 10 aa, Artificial Sequence
  Artificially Synthesized Peptide
GTDNSVVLSR

SEQ ID NO: 600 - protein, 11 aa, Artificial Sequence
  Artificially Synthesized Peptide
GTDNSVVLSRK

SEQ ID NO: 601 - protein, 11 aa, Artificial Sequence
  Artificially Synthesized Peptide
GVWIRTPPAYR

SEQ ID NO: 602 - protein, 9 aa, Artificial Sequence
  Artificially Synthesized Peptide
HISCLTFGR

SEQ ID NO: 603 - protein, 8 aa, Artificial Sequence
  Artificially Synthesized Peptide
HLNPNKTK

SEQ ID NO: 604 - protein, 9 aa, Artificial Sequence
  Artificially Synthesized Peptide
HLNPNKTKR

SEQ ID NO: 605 - protein, 11 aa, Artificial Sequence
  Artificially Synthesized Peptide
HTLWKAGILYK

SEQ ID NO: 606 - protein, 8 aa, Artificial Sequence
  Artificially Synthesized Peptide
ISCLTFGR

SEQ ID NO: 607 - protein, 8 aa, Artificial Sequence
  Artificially Synthesized Peptide
KAGILYKR

SEQ ID NO: 608 - protein, 11 aa, Artificial Sequence
  Artificially Synthesized Peptide
KLPVNRPIDWK

SEQ ID NO: 609 - protein, 9 aa, Artificial Sequence
  Artificially Synthesized Peptide
KVFVLGGCR

SEQ ID NO: 610 - protein, 9 aa, Artificial Sequence
  Artificially Synthesized Peptide
LAACFARSR

SEQ ID NO: 611 - protein, 8 aa, Artificial Sequence
  Artificially Synthesized Peptide
LLAACFAR

SEQ ID NO: 612 - protein, 10 aa, Artificial Sequence
  Artificially Synthesized Peptide
LLAACFARSR

SEQ ID NO: 613 - protein, 10 aa, Artificial Sequence
  Artificially Synthesized Peptide
LLDTASALYR

SEQ ID NO: 614 - protein, 11 aa, Artificial Sequence
  Artificially Synthesized Peptide
LLGCAANWILR

SEQ ID NO: 615 - protein, 11 aa, Artificial Sequence
  Artificially Synthesized Peptide
LSLGIHLNPNK

SEQ ID NO: 616 - protein, 11 aa, Artificial Sequence
  Artificially Synthesized Peptide
LSTLPETTVVR

SEQ ID NO: 617 - protein, 8 aa, Artificial Sequence
  Artificially Synthesized Peptide
LSYQHFRK

SEQ ID NO: 618 - protein, 8 aa, Artificial Sequence
  Artificially Synthesized Peptide
LTVNEKRR

SEQ ID NO: 619 - protein, 9 aa, Artificial Sequence
  Artificially Synthesized Peptide
LVSFGVWIR

SEQ ID NO: 620 - protein, 10 aa, Artificial Sequence
  Artificially Synthesized Peptide
LVVDFSQFSR

SEQ ID NO: 621 - protein, 11 aa, Artificial Sequence
  Artificially Synthesized Peptide
MSTTDLEAYFK

SEQ ID NO: 622 - protein, 8 aa, Artificial Sequence
  Artificially Synthesized Peptide
NLEDPASR

SEQ ID NO: 623 - protein, 11 aa, Artificial Sequence
  Artificially Synthesized Peptide
NLNVSIPWTHK

SEQ ID NO: 624 - protein, 8 aa, Artificial Sequence
  Artificially Synthesized Peptide
NSVVLSRK

SEQ ID NO: 625 - protein, 9 aa, Artificial Sequence
  Artificially Synthesized Peptide
NVSIPWTHK

SEQ ID NO: 626 - protein, 9 aa, Artificial Sequence
  Artificially Synthesized Peptide
PADDPSRGR

SEQ ID NO: 627 - protein, 9 aa, Artificial Sequence
  Artificially Synthesized Peptide
PARDVLCLR

SEQ ID NO: 628 - protein, 10 aa, Artificial Sequence
  Artificially Synthesized Peptide
PASTNRQSGR

SEQ ID NO: 629 - protein, 9 aa, Artificial Sequence
  Artificially Synthesized Peptide
PIDWKVCQR

SEQ ID NO: 630 - protein, 8 aa, Artificial Sequence
  Artificially Synthesized Peptide
PIILGFRK

SEQ ID NO: 631 - protein, 8 aa, Artificial Sequence
  Artificially Synthesized Peptide
PLEEELPR

SEQ ID NO: 632 - protein, 8 aa, Artificial Sequence
  Artificially Synthesized Peptide
PLSYQHFR

SEQ ID NO: 633 - protein, 9 aa, Artificial Sequence
  Artificially Synthesized Peptide
PLSYQHFRK

SEQ ID NO: 634 - protein, 8 aa, Artificial Sequence
  Artificially Synthesized Peptide
PLTVNEKR

SEQ ID NO: 635 - protein, 9 aa, Artificial Sequence
  Artificially Synthesized Peptide
PLTVNEKRR

SEQ ID NO: 636 - protein, 9 aa, Artificial Sequence
  Artificially Synthesized Peptide
PVGAESRGR

SEQ ID NO: 637 - protein, 9 aa, Artificial Sequence
  Artificially Synthesized Peptide
PVNRPIDWK

SEQ ID NO: 638 - protein, 10 aa, Artificial Sequence
  Artificially Synthesized Peptide
QAFTFSPTYK

SEQ ID NO: 639 - protein, 9 aa, Artificial Sequence
  Artificially Synthesized Peptide
QAGFFLLTR

SEQ ID NO: 640 - protein, 11 aa, Artificial Sequence
  Artificially Synthesized Peptide
QSPRRRRSQSR

SEQ ID NO: 641 - protein, 8 aa, Artificial Sequence
  Artificially Synthesized Peptide
QSSGILSR

SEQ ID NO: 642 - protein, 9 aa, Artificial Sequence
  Artificially Synthesized Peptide
RLKLIMPAR

SEQ ID NO: 643 - protein, 11 aa, Artificial Sequence
  Artificially Synthesized Peptide
RLKVFVLGGCR

SEQ ID NO: 644 - protein, 11 aa, Artificial Sequence
  Artificially Synthesized Peptide
RLVVDFSQFSR

SEQ ID NO: 645 - protein, 11 aa, Artificial Sequence
  Artificially Synthesized Peptide
RSPRRRTPSPR

SEQ ID NO: 646 - protein, 8 aa, Artificial Sequence
  Artificially Synthesized Peptide
RSQSPRRR

SEQ ID NO: 647 - protein, 9 aa, Artificial Sequence
  Artificially Synthesized Peptide
RSQSPRRRR

SEQ ID NO: 648 - protein, 8 aa, Artificial Sequence
  Artificially Synthesized Peptide
RTPSPRRR

SEQ ID NO: 649 - protein, 9 aa, Artificial Sequence
  Artificially Synthesized Peptide
RTPSPRRRR

SEQ ID NO: 650 - protein, 11 aa, Artificial Sequence
  Artificially Synthesized Peptide
RVTGGVFLVDK

SEQ ID NO: 651 - protein, 8 aa, Artificial Sequence
  Artificially Synthesized Peptide
SAGPCALR

SEQ ID NO: 652 - protein, 8 aa, Artificial Sequence
  Artificially Synthesized Peptide
SAICSVVR

SEQ ID NO: 653 - protein, 9 aa, Artificial Sequence
  Artificially Synthesized Peptide
SAICSVVRR

SEQ ID NO: 654 - protein, 11 aa, Artificial Sequence
  Artificially Synthesized Peptide
SALNPADDPSR

SEQ ID NO: 655 - protein, 10 aa, Artificial Sequence
  Artificially Synthesized Peptide
SLGIHLNPNK

SEQ ID NO: 656 - protein, 9 aa, Artificial Sequence
  Artificially Synthesized Peptide
SSAGPCALR

SEQ ID NO: 657 - protein, 10 aa, Artificial Sequence
  Artificially Synthesized Peptide
STLPETTVVR

SEQ ID NO: 658 - protein, 11 aa, Artificial Sequence
  Artificially Synthesized Peptide
STLPETTVVRR

SEQ ID NO: 659 - protein, 8 aa, Artificial Sequence
  Artificially Synthesized Peptide
STNRQSGR

SEQ ID NO: 660 - protein, 10 aa, Artificial Sequence
  Artificially Synthesized Peptide
STTDLEAYFK

SEQ ID NO: 661 - protein, 11 aa, Artificial Sequence
  Artificially Synthesized Peptide
TAELLAACFAR

SEQ ID NO: 662 - protein, 9 aa, Artificial Sequence
  Artificially Synthesized Peptide
TLPETTVVR

SEQ ID NO: 663 - protein, 10 aa, Artificial Sequence
  Artificially Synthesized Peptide
TLPETTVVRR

SEQ ID NO: 664 - protein, 11 aa, Artificial Sequence
  Artificially Synthesized Peptide
TLPETTVVRRR

SEQ ID NO: 665 - protein, 10 aa, Artificial Sequence
  Artificially Synthesized Peptide
TLWKAGILYK

SEQ ID NO: 666 - protein, 11 aa, Artificial Sequence
  Artificially Synthesized Peptide
TLWKAGILYKR

SEQ ID NO: 667 - protein, 9 aa, Artificial Sequence
  Artificially Synthesized Peptide
TSAICSVVR

SEQ ID NO: 668 - protein, 10 aa, Artificial Sequence
  Artificially Synthesized Peptide
TSAICSVVRR

SEQ ID NO: 669 - protein, 9 aa, Artificial Sequence
  Artificially Synthesized Peptide
TTDLEAYFK

SEQ ID NO: 670 - protein, 8 aa, Artificial Sequence
  Artificially Synthesized Peptide
TTSTGPCK

SEQ ID NO: 671 - protein, 9 aa, Artificial Sequence
  Artificially Synthesized Peptide
TTVVRRRGR

SEQ ID NO: 672 - protein, 8 aa, Artificial Sequence
  Artificially Synthesized Peptide
TVVRRRGR

SEQ ID NO: 673 - protein, 11 aa, Artificial Sequence
  Artificially Synthesized Peptide
TVVRRRGRSPR

SEQ ID NO: 674 - protein, 8 aa, Artificial Sequence
  Artificially Synthesized Peptide
VLGGCRHK

SEQ ID NO: 675 - protein, 11 aa, Artificial Sequence
  Artificially Synthesized Peptide
VLQAGFFLLTR

SEQ ID NO: 676 - protein, 8 aa, Artificial Sequence
  Artificially Synthesized Peptide
VSFGVWIR

SEQ ID NO: 677 - protein, 8 aa, Artificial Sequence
  Artificially Synthesized Peptide
VSIPWTHK

SEQ ID NO: 678 - protein, 10 aa, Artificial Sequence
  Artificially Synthesized Peptide
VTGGVFLVDK

SEQ ID NO: 679 - protein, 9 aa, Artificial Sequence
  Artificially Synthesized Peptide
VVDFSQFSR

SEQ ID NO: 680 - protein, 10 aa, Artificial Sequence
  Artificially Synthesized Peptide
VVRRRGRSPR

SEQ ID NO: 681 - protein, 11 aa, Artificial Sequence
  Artificially Synthesized Peptide
VVRRRGRSPRR

SEQ ID NO: 682 - protein, 9 aa, Artificial Sequence
  Artificially Synthesized Peptide
WIRTPPAYR

SEQ ID NO: 683 - protein, 8 aa, Artificial Sequence
  Artificially Synthesized Peptide
WLQFRNSK

SEQ ID NO: 684 - protein, 11 aa, Artificial Sequence
  Artificially Synthesized Peptide
WLWGMDIDPYK

SEQ ID NO: 685 - protein, 9 aa, Artificial Sequence
  Artificially Synthesized Peptide
YLPLDKGIK

SEQ ID NO: 686 - protein, 10 aa, Artificial Sequence
  Artificially Synthesized Peptide
YLVSFGVWIR

SEQ ID NO: 687 - protein, 10 aa, Artificial Sequence
  Artificially Synthesized Peptide
YMDDVVLGAK

SEQ ID NO: 688 - protein, 10 aa, Artificial Sequence
  Artificially Synthesized Peptide
YSHPIILGFR

SEQ ID NO: 689 - protein, 11 aa, Artificial Sequence
  Artificially Synthesized Peptide
YSHPIILGFRK

SEQ ID NO: 690 - protein, 8 aa, Artificial Sequence
  Artificially Synthesized Peptide
AFPHCLAF

SEQ ID NO: 691 - protein, 10 aa, Artificial Sequence
  Artificially Synthesized Peptide
AFPHCLAFSY

SEQ ID NO: 692 - protein, 11 aa, Artificial Sequence
  Artificially Synthesized Peptide
AFPHCLAFSYM

SEQ ID NO: 693 - protein, 10 aa, Artificial Sequence
  Artificially Synthesized Peptide
AFSSAGPCAL

SEQ ID NO: 694 - protein, 10 aa, Artificial Sequence
  Artificially Synthesized Peptide
AFSYMDDVVL

SEQ ID NO: 695 - protein, 8 aa, Artificial Sequence
  Artificially Synthesized Peptide
AFTFSPTY

SEQ ID NO: 696 - protein, 11 aa, Artificial Sequence
  Artificially Synthesized Peptide
AFTFSPTYKAF

SEQ ID NO: 697 - protein, 10 aa, Artificial Sequence
  Artificially Synthesized Peptide
AICSVVRRAF

SEQ ID NO: 698 - protein, 8 aa, Artificial Sequence
  Artificially Synthesized Peptide
AILCWGEL

SEQ ID NO: 699 - protein, 9 aa, Artificial Sequence
  Artificially Synthesized Peptide
AILCWGELM

SEQ ID NO: 700 - protein, 9 aa, Artificial Sequence
  Artificially Synthesized Peptide
ALMPLYACI

SEQ ID NO: 701 - protein, 9 aa, Artificial Sequence
  Artificially Synthesized Peptide
ALRQAILCW

SEQ ID NO: 702 - protein, 9 aa, Artificial Sequence
  Artificially Synthesized Peptide
AMQWNSTTF

SEQ ID NO: 703 - protein, 8 aa, Artificial Sequence
  Artificially Synthesized Peptide
ATPTGWGL

SEQ ID NO: 704 - protein, 10 aa, Artificial Sequence
  Artificially Synthesized Peptide
ATPTGWGLAI

SEQ ID NO: 705 - protein, 8 aa, Artificial Sequence
  Artificially Synthesized Peptide
AVPNLQSL

SEQ ID NO: 706 - protein, 11 aa, Artificial Sequence
  Artificially Synthesized Peptide
AVPNLQSLTNL

SEQ ID NO: 707 - protein, 9 aa, Artificial Sequence
  Artificially Synthesized Peptide
AYRPPNAPI

SEQ ID NO: 708 - protein, 10 aa, Artificial Sequence
  Artificially Synthesized Peptide
AYRPPNAPIL

SEQ ID NO: 709 - protein, 11 aa, Artificial Sequence
  Artificially Synthesized Peptide
CFRKLPVNRPI

SEQ ID NO: 710 - protein, 8 aa, Artificial Sequence
  Artificially Synthesized Peptide
CIPIPSSW

SEQ ID NO: 711 - protein, 10 aa, Artificial Sequence
  Artificially Synthesized Peptide
CIPIPSSWAF

SEQ ID NO: 712 - protein, 8 aa, Artificial Sequence
  Artificially Synthesized Peptide
CLGWLWGM

SEQ ID NO: 713 - protein, 10 aa, Artificial Sequence
  Artificially Synthesized Peptide
CLGWLWGMDI

SEQ ID NO: 714 - protein, 8 aa, Artificial Sequence
  Artificially Synthesized Peptide
CLIFLLVL

SEQ ID NO: 715 - protein, 9 aa, Artificial Sequence
  Artificially Synthesized Peptide
CLIFLLVLL

SEQ ID NO: 716 - protein, 11 aa, Artificial Sequence
  Artificially Synthesized Peptide
CLIFLLVLLDY

SEQ ID NO: 717 - protein, 8 aa, Artificial Sequence
  Artificially Synthesized Peptide
CLRRFIIF

SEQ ID NO: 718 - protein, 9 aa, Artificial Sequence
  Artificially Synthesized Peptide
CLRRFIIFL

SEQ ID NO: 719 - protein, 10 aa, Artificial Sequence
  Artificially Synthesized Peptide
CLRRFIIFLF

SEQ ID NO: 720 - protein, 11 aa, Artificial Sequence
  Artificially Synthesized Peptide
CLRRFIIFLFI

SEQ ID NO: 721 - protein, 10 aa, Artificial Sequence
  Artificially Synthesized Peptide
CTCIPIPSSW

SEQ ID NO: 722 - protein, 8 aa, Artificial Sequence
  Artificially Synthesized Peptide
DIDPYKEF

SEQ ID NO: 723 - protein, 9 aa, Artificial Sequence
  Artificially Synthesized Peptide
DLLDTASAL

SEQ ID NO: 724 - protein, 10 aa, Artificial Sequence
  Artificially Synthesized Peptide
DLLDTASALY

SEQ ID NO: 725 - protein, 11 aa, Artificial Sequence
  Artificially Synthesized Peptide
DLNLGNLNVSI

SEQ ID NO: 726 - protein, 11 aa, Artificial Sequence
  Artificially Synthesized Peptide
DTASALYREAL

SEQ ID NO: 727 - protein, 8 aa, Artificial Sequence
  Artificially Synthesized Peptide
DWKVCQRI

SEQ ID NO: 728 - protein, 11 aa, Artificial Sequence
  Artificially Synthesized Peptide
DWKVCQRIVGL

SEQ ID NO: 729 - protein, 11 aa, Artificial Sequence
  Artificially Synthesized Peptide
DYQGMLPVCPL

SEQ ID NO: 730 - protein, 8 aa, Artificial Sequence
  Artificially Synthesized Peptide
ELGEEIRL

SEQ ID NO: 731 - protein, 10 aa, Artificial Sequence
  Artificially Synthesized Peptide
ELLSFLPSDF

SEQ ID NO: 732 - protein, 11 aa, Artificial Sequence
  Artificially Synthesized Peptide
ELLSFLPSDFF

SEQ ID NO: 733 - protein, 9 aa, Artificial Sequence
  Artificially Synthesized Peptide
EYLVSFGVW

SEQ ID NO: 734 - protein, 10 aa, Artificial Sequence
  Artificially Synthesized Peptide
EYLVSFGVWI

SEQ ID NO: 735 - protein, 8 aa, Artificial Sequence
  Artificially Synthesized Peptide
FFCLWVYI

SEQ ID NO: 736 - protein, 8 aa, Artificial Sequence
  Artificially Synthesized Peptide
FFLLTRIL

SEQ ID NO: 737 - protein, 10 aa, Artificial Sequence
  Artificially Synthesized Peptide
FFLLTRILTI

SEQ ID NO: 738 - protein, 11 aa, Artificial Sequence
  Artificially Synthesized Peptide
FFPDHQLDPAF

SEQ ID NO: 739 - protein, 8 aa, Artificial Sequence
  Artificially Synthesized Peptide
FIIFLFIL

SEQ ID NO: 740 - protein, 9 aa, Artificial Sequence
  Artificially Synthesized Peptide
FIIFLFILL

SEQ ID NO: 741 - protein, 10 aa, Artificial Sequence
  Artificially Synthesized Peptide
FIIFLFILLL

SEQ ID NO: 742 - protein, 8 aa, Artificial Sequence
  Artificially Synthesized Peptide
FILLLCLI

SEQ ID NO: 743 - protein, 9 aa, Artificial Sequence
  Artificially Synthesized Peptide
FILLLCLIF

SEQ ID NO: 744 - protein, 10 aa, Artificial Sequence
  Artificially Synthesized Peptide
FILLLCLIFL

SEQ ID NO: 745 - protein, 11 aa, Artificial Sequence
  Artificially Synthesized Peptide
FILLLCLIFLL

SEQ ID NO: 746 - protein, 9 aa, Artificial Sequence
  Artificially Synthesized Peptide
FLFILLLCL

SEQ ID NO: 747 - protein, 10 aa, Artificial Sequence
  Artificially Synthesized Peptide
FLFILLLCLI

SEQ ID NO: 748 - protein, 11 aa, Artificial Sequence
  Artificially Synthesized Peptide
FLFILLLCLIF

SEQ ID NO: 749 - protein, 8 aa, Artificial Sequence
  Artificially Synthesized Peptide
FLGPLLVL

SEQ ID NO: 750 - protein, 10 aa, Artificial Sequence
  Artificially Synthesized Peptide
FLLAQFTSAI

SEQ ID NO: 751 - protein, 9 aa, Artificial Sequence
  Artificially Synthesized Peptide
FLLSLGIHL

SEQ ID NO: 752 - protein, 9 aa, Artificial Sequence
  Artificially Synthesized Peptide
FLLTRILTI

SEQ ID NO: 753 - protein, 8 aa, Artificial Sequence
  Artificially Synthesized Peptide
FLLVLLDY

SEQ ID NO: 754 - protein, 11 aa, Artificial Sequence
  Artificially Synthesized Peptide
FLLVLLDYQGM

SEQ ID NO: 755 - protein, 10 aa, Artificial Sequence
  Artificially Synthesized Peptide
FTFSPTYKAF

SEQ ID NO: 756 - protein, 11 aa, Artificial Sequence
  Artificially Synthesized Peptide
FTFSPTYKAFL

SEQ ID NO: 757 - protein, 9 aa, Artificial Sequence
  Artificially Synthesized Peptide
FTQCGYPAL

SEQ ID NO: 758 - protein, 10 aa, Artificial Sequence
  Artificially Synthesized Peptide
FTQCGYPALM

SEQ ID NO: 759 - protein, 9 aa, Artificial Sequence
  Artificially Synthesized Peptide
FVGLSPTVW

SEQ ID NO: 760 - protein, 10 aa, Artificial Sequence
  Artificially Synthesized Peptide
FVGLSPTVWL

SEQ ID NO: 761 - protein, 10 aa, Artificial Sequence
  Artificially Synthesized Peptide
FVLGGCRHKL

SEQ ID NO: 762 - protein, 8 aa, Artificial Sequence
  Artificially Synthesized Peptide
FVQWFVGL

SEQ ID NO: 763 - protein, 8 aa, Artificial Sequence
  Artificially Synthesized Peptide
FVYVPSAL

SEQ ID NO: 764 - protein, 11 aa, Artificial Sequence
  Artificially Synthesized Peptide
GFAAPFTQCGY

SEQ ID NO: 765 - protein, 8 aa, Artificial Sequence
  Artificially Synthesized Peptide
GFFLLTRI

SEQ ID NO: 766 - protein, 9 aa, Artificial Sequence
  Artificially Synthesized Peptide
GFFLLTRIL

SEQ ID NO: 767 - protein, 11 aa, Artificial Sequence
  Artificially Synthesized Peptide
GFFLLTRILTI

SEQ ID NO: 768 - protein, 8 aa, Artificial Sequence
  Artificially Synthesized Peptide
GFFPDHQL

SEQ ID NO: 769 - protein, 9 aa, Artificial Sequence
  Artificially Synthesized Peptide
GFLGPLLVL

SEQ ID NO: 770 - protein, 11 aa, Artificial Sequence
  Artificially Synthesized Peptide
GFRKIPMGVGL

SEQ ID NO: 771 - protein, 9 aa, Artificial Sequence
  Artificially Synthesized Peptide
GLLGFAAPF

SEQ ID NO: 772 - protein, 10 aa, Artificial Sequence
  Artificially Synthesized Peptide
GLSPFLLAQF

SEQ ID NO: 773 - protein, 8 aa, Artificial Sequence
  Artificially Synthesized Peptide
GLSPTVWL

SEQ ID NO: 774 - protein, 11 aa, Artificial Sequence
  Artificially Synthesized Peptide
GLSPTVWLSVI

SEQ ID NO: 775 - protein, 10 aa, Artificial Sequence
  Artificially Synthesized Peptide
GMDIDPYKEF

SEQ ID NO: 776 - protein, 8 aa, Artificial Sequence
  Artificially Synthesized Peptide
GMLPVCPL

SEQ ID NO: 777 - protein, 8 aa, Artificial Sequence
  Artificially Synthesized Peptide
GTDNSVVL

SEQ ID NO: 778 - protein, 10 aa, Artificial Sequence
  Artificially Synthesized Peptide
GTNLSVPNPL

SEQ ID NO: 779 - protein, 11 aa, Artificial Sequence
  Artificially Synthesized Peptide
GTSFVYVPSAL

SEQ ID NO: 780 - protein, 8 aa, Artificial Sequence
  Artificially Synthesized Peptide
GVGLSPFL

SEQ ID NO: 781 - protein, 9 aa, Artificial Sequence
  Artificially Synthesized Peptide
GVGLSPFLL

SEQ ID NO: 782 - protein, 10 aa, Artificial Sequence
  Artificially Synthesized Peptide
GVWIRTPPAY

SEQ ID NO: 783 - protein, 8 aa, Artificial Sequence
  Artificially Synthesized Peptide
GWLWGMDI

SEQ ID NO: 784 - protein, 11 aa, Artificial Sequence
  Artificially Synthesized Peptide
GWLWGMDIDPY

SEQ ID NO: 785 - protein, 9 aa, Artificial Sequence
  Artificially Synthesized Peptide
GWSPQAQGI

SEQ ID NO: 786 - protein, 10 aa, Artificial Sequence
  Artificially Synthesized Peptide
GWSPQAQGIL

SEQ ID NO: 787 - protein, 8 aa, Artificial Sequence
  Artificially Synthesized Peptide
GYPALMPL

SEQ ID NO: 788 - protein, 9 aa, Artificial Sequence
  Artificially Synthesized Peptide
GYPALMPLY

SEQ ID NO: 789 - protein, 10 aa, Artificial Sequence
  Artificially Synthesized Peptide
GYRWMCLRRF

SEQ ID NO: 790 - protein, 11 aa, Artificial Sequence
  Artificially Synthesized Peptide
GYRWMCLRRFI

SEQ ID NO: 791 - protein, 9 aa, Artificial Sequence
  Artificially Synthesized Peptide
GYSLNFMGY

SEQ ID NO: 792 - protein, 11 aa, Artificial Sequence
  Artificially Synthesized Peptide
GYSLNFMGYVI

SEQ ID NO: 793 - protein, 10 aa, Artificial Sequence
  Artificially Synthesized Peptide
HFASPLHVAW

SEQ ID NO: 794 - protein, 8 aa, Artificial Sequence
  Artificially Synthesized Peptide
HFRKLLLL

SEQ ID NO: 795 - protein, 9 aa, Artificial Sequence
  Artificially Synthesized Peptide
HLLVGSSGL

SEQ ID NO: 796 - protein, 10 aa, Artificial Sequence
  Artificially Synthesized Peptide
HLNPNKTKRW

SEQ ID NO: 797 - protein, 8 aa, Artificial Sequence
  Artificially Synthesized Peptide
HLYSHPII

SEQ ID NO: 798 - protein, 9 aa, Artificial Sequence
  Artificially Synthesized Peptide
HLYSHPIIL

SEQ ID NO: 799 - protein, 11 aa, Artificial Sequence
  Artificially Synthesized Peptide
HLYSHPIILGF

SEQ ID NO: 800 - protein, 10 aa, Artificial Sequence
  Artificially Synthesized Peptide
HTAELLAACF

SEQ ID NO: 801 - protein, 8 aa, Artificial Sequence
  Artificially Synthesized Peptide
HTALRQAI

SEQ ID NO: 802 - protein, 9 aa, Artificial Sequence
  Artificially Synthesized Peptide
HTALRQAIL

SEQ ID NO: 803 - protein, 11 aa, Artificial Sequence
  Artificially Synthesized Peptide
HTALRQAILCW

SEQ ID NO: 804 - protein, 8 aa, Artificial Sequence
  Artificially Synthesized Peptide
HTLWKAGI

SEQ ID NO: 805 - protein, 9 aa, Artificial Sequence
  Artificially Synthesized Peptide
HTLWKAGIL

SEQ ID NO: 806 - protein, 10 aa, Artificial Sequence
  Artificially Synthesized Peptide
HTLWKAGILY

SEQ ID NO: 807 - protein, 11 aa, Artificial Sequence
  Artificially Synthesized Peptide
HYLHTLWKAGI

SEQ ID NO: 808 - protein, 8 aa, Artificial Sequence
  Artificially Synthesized Peptide
IFFCLWVY

SEQ ID NO: 809 - protein, 9 aa, Artificial Sequence
  Artificially Synthesized Peptide
IFFCLWVYI

SEQ ID NO: 810 - protein, 8 aa, Artificial Sequence
  Artificially Synthesized Peptide
IFLFILLL

SEQ ID NO: 811 - protein, 10 aa, Artificial Sequence
  Artificially Synthesized Peptide
IFLFILLLCL

SEQ ID NO: 812 - protein, 11 aa, Artificial Sequence
  Artificially Synthesized Peptide
IFLFILLLCLI

SEQ ID NO: 813 - protein, 9 aa, Artificial Sequence
  Artificially Synthesized Peptide
IFLLVLLDY

SEQ ID NO: 814 - protein, 8 aa, Artificial Sequence
  Artificially Synthesized Peptide
IIFLFILL

SEQ ID NO: 815 - protein, 9 aa, Artificial Sequence
  Artificially Synthesized Peptide
IIFLFILLL

SEQ ID NO: 816 - protein, 11 aa, Artificial Sequence
  Artificially Synthesized Peptide
IIFLFILLLCL

SEQ ID NO: 817 - protein, 8 aa, Artificial Sequence
  Artificially Synthesized Peptide
IILGFRKI

SEQ ID NO: 818 - protein, 10 aa, Artificial Sequence
  Artificially Synthesized Peptide
IILGFRKIPM

SEQ ID NO: 819 - protein, 8 aa, Artificial Sequence
  Artificially Synthesized Peptide
ILCWGELM

SEQ ID NO: 820 - protein, 9 aa, Artificial Sequence
  Artificially Synthesized Peptide
ILGFRKIPM

SEQ ID NO: 821 - protein, 8 aa, Artificial Sequence
  Artificially Synthesized Peptide
ILLLCLIF

SEQ ID NO: 822 - protein, 9 aa, Artificial Sequence
  Artificially Synthesized Peptide
ILLLCLIFL

SEQ ID NO: 823 - protein, 10 aa, Artificial Sequence
  Artificially Synthesized Peptide
ILLLCLIFLL

SEQ ID NO: 824 - protein, 9 aa, Artificial Sequence
  Artificially Synthesized Peptide
ILRGTSFVY

SEQ ID NO: 825 - protein, 8 aa, Artificial Sequence
  Artificially Synthesized Peptide
ILTIPQSL

SEQ ID NO: 826 - protein, 11 aa, Artificial Sequence
  Artificially Synthesized Peptide
ILTIPQSLDSW

SEQ ID NO: 827 - protein, 11 aa, Artificial Sequence
  Artificially Synthesized Peptide
IVGLLGFAAPF

SEQ ID NO: 828 - protein, 11 aa, Artificial Sequence
  Artificially Synthesized Peptide
IWMMWYWGPSL

SEQ ID NO: 829 - protein, 10 aa, Artificial Sequence
  Artificially Synthesized Peptide
KFAVPNLQSL

SEQ ID NO: 830 - protein, 8 aa, Artificial Sequence
  Artificially Synthesized Peptide
KIPMGVGL

SEQ ID NO: 831 - protein, 11 aa, Artificial Sequence
  Artificially Synthesized Peptide
KIPMGVGLSPF

SEQ ID NO: 832 - protein, 8 aa, Artificial Sequence
  Artificially Synthesized Peptide
KLCLGWLW

SEQ ID NO: 833 - protein, 10 aa, Artificial Sequence
  Artificially Synthesized Peptide
KLCLGWLWGM

SEQ ID NO: 834 - protein, 9 aa, Artificial Sequence
  Artificially Synthesized Peptide
KLHLYSHPI

SEQ ID NO: 835 - protein, 10 aa, Artificial Sequence
  Artificially Synthesized Peptide
KLHLYSHPII

SEQ ID NO: 836 - protein, 11 aa, Artificial Sequence
  Artificially Synthesized Peptide
KLHLYSHPIIL

SEQ ID NO: 837 - protein, 8 aa, Artificial Sequence
  Artificially Synthesized Peptide
KLIMPARF

SEQ ID NO: 838 - protein, 9 aa, Artificial Sequence
  Artificially Synthesized Peptide
KLIMPARFY

SEQ ID NO: 839 - protein, 8 aa, Artificial Sequence
  Artificially Synthesized Peptide
KLPVNRPI

SEQ ID NO: 840 - protein, 10 aa, Artificial Sequence
  Artificially Synthesized Peptide
KLPVNRPIDW

SEQ ID NO: 841 - protein, 9 aa, Artificial Sequence
  Artificially Synthesized Peptide
KTKRWGYSL

SEQ ID NO: 842 - protein, 11 aa, Artificial Sequence
  Artificially Synthesized Peptide
KTKRWGYSLNF

SEQ ID NO: 843 - protein, 9 aa, Artificial Sequence
  Artificially Synthesized Peptide
KVCQRIVGL

SEQ ID NO: 844 - protein, 10 aa, Artificial Sequence
  Artificially Synthesized Peptide
KVCQRIVGLL

SEQ ID NO: 845 - protein, 8 aa, Artificial Sequence
  Artificially Synthesized Peptide
KVGNFTGL

SEQ ID NO: 846 - protein, 9 aa, Artificial Sequence
  Artificially Synthesized Peptide
KVGNFTGLY

SEQ ID NO: 847 - protein, 8 aa, Artificial Sequence
  Artificially Synthesized Peptide
KVLHKRTL

SEQ ID NO: 848 - protein, 10 aa, Artificial Sequence
  Artificially Synthesized Peptide
KVLHKRTLGL

SEQ ID NO: 849 - protein, 9 aa, Artificial Sequence
  Artificially Synthesized Peptide
KYLPLDKGI

SEQ ID NO: 850 - protein, 8 aa, Artificial Sequence
  Artificially Synthesized Peptide
KYTSFPWL

SEQ ID NO: 851 - protein, 9 aa, Artificial Sequence
  Artificially Synthesized Peptide
KYTSFPWLL

SEQ ID NO: 852 - protein, 8 aa, Artificial Sequence
  Artificially Synthesized Peptide
LFILLLCL

SEQ ID NO: 853 - protein, 9 aa, Artificial Sequence
  Artificially Synthesized Peptide
LFILLLCLI

SEQ ID NO: 854 - protein, 10 aa, Artificial Sequence
  Artificially Synthesized Peptide
LFILLLCLIF

SEQ ID NO: 855 - protein, 11 aa, Artificial Sequence
  Artificially Synthesized Peptide
LFILLLCLIFL

SEQ ID NO: 856 - protein, 8 aa, Artificial Sequence
  Artificially Synthesized Peptide
LIFLLVLL

SEQ ID NO: 857 - protein, 10 aa, Artificial Sequence
  Artificially Synthesized Peptide
LIFLLVLLDY

SEQ ID NO: 858 - protein, 8 aa, Artificial Sequence
  Artificially Synthesized Peptide
LIMPARFY

SEQ ID NO: 859 - protein, 9 aa, Artificial Sequence
  Artificially Synthesized Peptide
LLAQFTSAI

SEQ ID NO: 860 - protein, 8 aa, Artificial Sequence
  Artificially Synthesized Peptide
LLCLIFLL

SEQ ID NO: 861 - protein, 10 aa, Artificial Sequence
  Artificially Synthesized Peptide
LLCLIFLLVL

SEQ ID NO: 862 - protein, 11 aa, Artificial Sequence
  Artificially Synthesized Peptide
LLCLIFLLVLL

SEQ ID NO: 863 - protein, 8 aa, Artificial Sequence
  Artificially Synthesized Peptide
LLDTASAL

SEQ ID NO: 864 - protein, 9 aa, Artificial Sequence
  Artificially Synthesized Peptide
LLDTASALY

SEQ ID NO: 865 - protein, 8 aa, Artificial Sequence
  Artificially Synthesized Peptide
LLDYQGML

SEQ ID NO: 866 - protein, 8 aa, Artificial Sequence
  Artificially Synthesized Peptide
LLGCAANW

SEQ ID NO: 867 - protein, 9 aa, Artificial Sequence
  Artificially Synthesized Peptide
LLGCAANWI

SEQ ID NO: 868 - protein, 10 aa, Artificial Sequence
  Artificially Synthesized Peptide
LLGCAANWIL

SEQ ID NO: 869 - protein, 8 aa, Artificial Sequence
  Artificially Synthesized Peptide
LLGFAAPF

SEQ ID NO: 870 - protein, 11 aa, Artificial Sequence
  Artificially Synthesized Peptide
LLGWSPQAQGI

SEQ ID NO: 871 - protein, 8 aa, Artificial Sequence
  Artificially Synthesized Peptide
LLLCLIFL

SEQ ID NO: 872 - protein, 9 aa, Artificial Sequence
  Artificially Synthesized Peptide
LLLCLIFLL

SEQ ID NO: 873 - protein, 11 aa, Artificial Sequence
  Artificially Synthesized Peptide
LLLCLIFLLVL

SEQ ID NO: 874 - protein, 8 aa, Artificial Sequence
  Artificially Synthesized Peptide
LLPIFFCL

SEQ ID NO: 875 - protein, 9 aa, Artificial Sequence
  Artificially Synthesized Peptide
LLPIFFCLW

SEQ ID NO: 876 - protein, 11 aa, Artificial Sequence
  Artificially Synthesized Peptide
LLPIFFCLWVY

SEQ ID NO: 877 - protein, 9 aa, Artificial Sequence
  Artificially Synthesized Peptide
LLSFLPSDF

SEQ ID NO: 878 - protein, 10 aa, Artificial Sequence
  Artificially Synthesized Peptide
LLSFLPSDFF

SEQ ID NO: 879 - protein, 8 aa, Artificial Sequence
  Artificially Synthesized Peptide
LLSLGIHL

SEQ ID NO: 880 - protein, 8 aa, Artificial Sequence
  Artificially Synthesized Peptide
LLSSNLSW

SEQ ID NO: 881 - protein, 9 aa, Artificial Sequence
  Artificially Synthesized Peptide
LLSSNLSWL

SEQ ID NO: 882 - protein, 11 aa, Artificial Sequence
  Artificially Synthesized Peptide
LLSSNLSWLSL

SEQ ID NO: 883 - protein, 8 aa, Artificial Sequence
  Artificially Synthesized Peptide
LLTRILTI

SEQ ID NO: 884 - protein, 8 aa, Artificial Sequence
  Artificially Synthesized Peptide
LLVGSSGL

SEQ ID NO: 885 - protein, 10 aa, Artificial Sequence
  Artificially Synthesized Peptide
LLVLLDYQGM

SEQ ID NO: 886 - protein, 11 aa, Artificial Sequence
  Artificially Synthesized Peptide
LLVLLDYQGML

SEQ ID NO: 887 - protein, 8 aa, Artificial Sequence
  Artificially Synthesized Peptide
LLVLQAGF

SEQ ID NO: 888 - protein, 9 aa, Artificial Sequence
  Artificially Synthesized Peptide
LLVLQAGFF

SEQ ID NO: 889 - protein, 10 aa, Artificial Sequence
  Artificially Synthesized Peptide
LLVLQAGFFL

SEQ ID NO: 890 - protein, 11 aa, Artificial Sequence
  Artificially Synthesized Peptide
LLVLQAGFFLL

SEQ ID NO: 891 - protein, 8 aa, Artificial Sequence
  Artificially Synthesized Peptide
LLVPFVQW

SEQ ID NO: 892 - protein, 9 aa, Artificial Sequence
  Artificially Synthesized Peptide
LLVPFVQWF

SEQ ID NO: 893 - protein, 9 aa, Artificial Sequence
  Artificially Synthesized Peptide
LLWFHISCL

SEQ ID NO: 894 - protein, 11 aa, Artificial Sequence
  Artificially Synthesized Peptide
LLWFHISCLTF

SEQ ID NO: 895 - protein, 8 aa, Artificial Sequence
  Artificially Synthesized Peptide
LMPLYACI

SEQ ID NO: 896 - protein, 9 aa, Artificial Sequence
  Artificially Synthesized Peptide
LTFGRETVL

SEQ ID NO: 897 - protein, 11 aa, Artificial Sequence
  Artificially Synthesized Peptide
LTFGRETVLEY

SEQ ID NO: 898 - protein, 10 aa, Artificial Sequence
  Artificially Synthesized Peptide
LTIPQSLDSW

SEQ ID NO: 899 - protein, 11 aa, Artificial Sequence
  Artificially Synthesized Peptide
LTIPQSLDSWW

SEQ ID NO: 900 - protein, 9 aa, Artificial Sequence
  Artificially Synthesized Peptide
LTNLLSSNL

SEQ ID NO: 901 - protein, 11 aa, Artificial Sequence
  Artificially Synthesized Peptide
LTNLLSSNLSW

SEQ ID NO: 902 - protein, 11 aa, Artificial Sequence
  Artificially Synthesized Peptide
LTRILTIPQSL

SEQ ID NO: 903 - protein, 9 aa, Artificial Sequence
  Artificially Synthesized Peptide
LTVNEKRRL

SEQ ID NO: 904 - protein, 9 aa, Artificial Sequence
  Artificially Synthesized Peptide
LVLLDYQGM

SEQ ID NO: 905 - protein, 10 aa, Artificial Sequence
  Artificially Synthesized Peptide
LVLLDYQGML

SEQ ID NO: 906 - protein, 8 aa, Artificial Sequence
  Artificially Synthesized Peptide
LVLQAGFF

SEQ ID NO: 907 - protein, 9 aa, Artificial Sequence
  Artificially Synthesized Peptide
LVLQAGFFL

SEQ ID NO: 908 - protein, 10 aa, Artificial Sequence
  Artificially Synthesized Peptide
LVLQAGFFLL

SEQ ID NO: 909 - protein, 8 aa, Artificial Sequence
  Artificially Synthesized Peptide
LVPFVQWF

SEQ ID NO: 910 - protein, 11 aa, Artificial Sequence
  Artificially Synthesized Peptide
LVPFVQWFVGL

SEQ ID NO: 911 - protein, 8 aa, Artificial Sequence
  Artificially Synthesized Peptide
LVSFGVWI

SEQ ID NO: 912 - protein, 8 aa, Artificial Sequence
  Artificially Synthesized Peptide
LVVDFSQF

SEQ ID NO: 913 - protein, 8 aa, Artificial Sequence
  Artificially Synthesized Peptide
LWFHISCL

SEQ ID NO: 914 - protein, 10 aa, Artificial Sequence
  Artificially Synthesized Peptide
LWFHISCLTF

SEQ ID NO: 915 - protein, 9 aa, Artificial Sequence
  Artificially Synthesized Peptide
LWGMDIDPY

SEQ ID NO: 916 - protein, 8 aa, Artificial Sequence
  Artificially Synthesized Peptide
LWKAGILY

SEQ ID NO: 917 - protein, 8 aa, Artificial Sequence
  Artificially Synthesized Peptide
LYSHPIIL

SEQ ID NO: 918 - protein, 10 aa, Artificial Sequence
  Artificially Synthesized Peptide
LYSHPIILGF

SEQ ID NO: 919 - protein, 9 aa, Artificial Sequence
  Artificially Synthesized Peptide
MMWYWGPSL

SEQ ID NO: 920 - protein, 10 aa, Artificial Sequence
  Artificially Synthesized Peptide
MMWYWGPSLY

SEQ ID NO: 921 - protein, 8 aa, Artificial Sequence
  Artificially Synthesized Peptide
MWYWGPSL

SEQ ID NO: 922 - protein, 9 aa, Artificial Sequence
  Artificially Synthesized Peptide
MWYWGPSLY

SEQ ID NO: 923 - protein, 8 aa, Artificial Sequence
  Artificially Synthesized Peptide
NFLLSLGI

SEQ ID NO: 924 - protein, 10 aa, Artificial Sequence
  Artificially Synthesized Peptide
NFLLSLGIHL

SEQ ID NO: 925 - protein, 9 aa, Artificial Sequence
  Artificially Synthesized Peptide
NLGNLNVSI

SEQ ID NO: 926 - protein, 11 aa, Artificial Sequence
  Artificially Synthesized Peptide
NLGNLNVSIPW

SEQ ID NO: 927 - protein, 9 aa, Artificial Sequence
  Artificially Synthesized Peptide
NLLSSNLSW

SEQ ID NO: 928 - protein, 10 aa, Artificial Sequence
  Artificially Synthesized Peptide
NLLSSNLSWL

SEQ ID NO: 929 - protein, 8 aa, Artificial Sequence
  Artificially Synthesized Peptide
NLNVSIPW

SEQ ID NO: 930 - protein, 8 aa, Artificial Sequence
  Artificially Synthesized Peptide
NLQSLTNL

SEQ ID NO: 931 - protein, 9 aa, Artificial Sequence
  Artificially Synthesized Peptide
NLQSLTNLL

SEQ ID NO: 932 - protein, 8 aa, Artificial Sequence
  Artificially Synthesized Peptide
NLSVPNPL

SEQ ID NO: 933 - protein, 10 aa, Artificial Sequence
  Artificially Synthesized Peptide
NLSVPNPLGF

SEQ ID NO: 934 - protein, 9 aa, Artificial Sequence
  Artificially Synthesized Peptide
NWILRGTSF

SEQ ID NO: 935 - protein, 11 aa, Artificial Sequence
  Artificially Synthesized Peptide
NWILRGTSFVY

SEQ ID NO: 936 - protein, 11 aa, Artificial Sequence
  Artificially Synthesized Peptide
PFLLAQFTSAI

SEQ ID NO: 937 - protein, 10 aa, Artificial Sequence
  Artificially Synthesized Peptide
PFTQCGYPAL

SEQ ID NO: 938 - protein, 11 aa, Artificial Sequence
  Artificially Synthesized Peptide
PFTQCGYPALM

SEQ ID NO: 939 - protein, 9 aa, Artificial Sequence
  Artificially Synthesized Peptide
PFVQWFVGL

SEQ ID NO: 940 - protein, 10 aa, Artificial Sequence
  Artificially Synthesized Peptide
PIDWKVCQRI

SEQ ID NO: 941 - protein, 9 aa, Artificial Sequence
  Artificially Synthesized Peptide
PIFFCLWVY

SEQ ID NO: 942 - protein, 10 aa, Artificial Sequence
  Artificially Synthesized Peptide
PIFFCLWVYI

SEQ ID NO: 943 - protein, 8 aa, Artificial Sequence
  Artificially Synthesized Peptide
PIHTAELL

SEQ ID NO: 944 - protein, 9 aa, Artificial Sequence
  Artificially Synthesized Peptide
PIILGFRKI

SEQ ID NO: 945 - protein, 11 aa, Artificial Sequence
  Artificially Synthesized Peptide
PIILGFRKIPM

SEQ ID NO: 946 - protein, 8 aa, Artificial Sequence
  Artificially Synthesized Peptide
PIPSSWAF

SEQ ID NO: 947 - protein, 9 aa, Artificial Sequence
  Artificially Synthesized Peptide
PLDKGIKPY

SEQ ID NO: 948 - protein, 10 aa, Artificial Sequence
  Artificially Synthesized Peptide
PLDKGIKPYY

SEQ ID NO: 949 - protein, 9 aa, Artificial Sequence
  Artificially Synthesized Peptide
PLEEELPRL

SEQ ID NO: 950 - protein, 10 aa, Artificial Sequence
  Artificially Synthesized Peptide
PLGFFPDHQL

SEQ ID NO: 951 - protein, 10 aa, Artificial Sequence
  Artificially Synthesized Peptide
PLHPAAMPHL

SEQ ID NO: 952 - protein, 11 aa, Artificial Sequence
  Artificially Synthesized Peptide
PLHPAAMPHLL

SEQ ID NO: 953 - protein, 9 aa, Artificial Sequence
  Artificially Synthesized Peptide
PLLPIFFCL

SEQ ID NO: 954 - protein, 10 aa, Artificial Sequence
  Artificially Synthesized Peptide
PLLPIFFCLW

SEQ ID NO: 955 - protein, 9 aa, Artificial Sequence
  Artificially Synthesized Peptide
PLLVLQAGF

SEQ ID NO: 956 - protein, 10 aa, Artificial Sequence
  Artificially Synthesized Peptide
PLLVLQAGFF

SEQ ID NO: 957 - protein, 11 aa, Artificial Sequence
  Artificially Synthesized Peptide
PLLVLQAGFFL

SEQ ID NO: 958 - protein, 9 aa, Artificial Sequence
  Artificially Synthesized Peptide
PLPIHTAEL

SEQ ID NO: 959 - protein, 10 aa, Artificial Sequence
  Artificially Synthesized Peptide
PLPIHTAELL

SEQ ID NO: 960 - protein, 10 aa, Artificial Sequence
  Artificially Synthesized Peptide
PLSYQHFRKL

SEQ ID NO: 961 - protein, 11 aa, Artificial Sequence
  Artificially Synthesized Peptide
PLSYQHFRKLL

SEQ ID NO: 962 - protein, 10 aa, Artificial Sequence
  Artificially Synthesized Peptide
PLTVNEKRRL

SEQ ID NO: 963 - protein, 9 aa, Artificial Sequence
  Artificially Synthesized Peptide
PMGVGLSPF

SEQ ID NO: 964 - protein, 10 aa, Artificial Sequence
  Artificially Synthesized Peptide
PMGVGLSPFL

SEQ ID NO: 965 - protein, 11 aa, Artificial Sequence
  Artificially Synthesized Peptide
PMGVGLSPFLL

SEQ ID NO: 966 - protein, 8 aa, Artificial Sequence
  Artificially Synthesized Peptide
PTGWGLAI

SEQ ID NO: 967 - protein, 8 aa, Artificial Sequence
  Artificially Synthesized Peptide
PTTGRTSL

SEQ ID NO: 968 - protein, 9 aa, Artificial Sequence
  Artificially Synthesized Peptide
PTTGRTSLY

SEQ ID NO: 969 - protein, 8 aa, Artificial Sequence
  Artificially Synthesized Peptide
PTVQASKL

SEQ ID NO: 970 - protein, 10 aa, Artificial Sequence
  Artificially Synthesized Peptide
PTVQASKLCL

SEQ ID NO: 971 - protein, 8 aa, Artificial Sequence
  Artificially Synthesized Peptide
PTVWLSVI

SEQ ID NO: 972 - protein, 9 aa, Artificial Sequence
  Artificially Synthesized Peptide
PTVWLSVIW

SEQ ID NO: 973 - protein, 10 aa, Artificial Sequence
  Artificially Synthesized Peptide
PTVWLSVIWM

SEQ ID NO: 974 - protein, 8 aa, Artificial Sequence
  Artificially Synthesized Peptide
PVNRPIDW

SEQ ID NO: 975 - protein, 10 aa, Artificial Sequence
  Artificially Synthesized Peptide
PWLLGCAANW

SEQ ID NO: 976 - protein, 11 aa, Artificial Sequence
  Artificially Synthesized Peptide
PWLLGCAANWI

SEQ ID NO: 977 - protein, 9 aa, Artificial Sequence
  Artificially Synthesized Peptide
PWTHKVGNF

SEQ ID NO: 978 - protein, 9 aa, Artificial Sequence
  Artificially Synthesized Peptide
QLDPARDVL

SEQ ID NO: 979 - protein, 11 aa, Artificial Sequence
  Artificially Synthesized Peptide
QLDPARDVLCL

SEQ ID NO: 980 - protein, 10 aa, Artificial Sequence
  Artificially Synthesized Peptide
QLLWFHISCL

SEQ ID NO: 981 - protein, 11 aa, Artificial Sequence
  Artificially Synthesized Peptide
QVFADATPTGW

SEQ ID NO: 982 - protein, 11 aa, Artificial Sequence
  Artificially Synthesized Peptide
QWFVGLSPTVW

SEQ ID NO: 983 - protein, 8 aa, Artificial Sequence
  Artificially Synthesized Peptide
RFIIFLFI

SEQ ID NO: 984 - protein, 9 aa, Artificial Sequence
  Artificially Synthesized Peptide
RFIIFLFIL

SEQ ID NO: 985 - protein, 10 aa, Artificial Sequence
  Artificially Synthesized Peptide
RFIIFLFILL

SEQ ID NO: 986 - protein, 11 aa, Artificial Sequence
  Artificially Synthesized Peptide
RFIIFLFILLL

SEQ ID NO: 987 - protein, 8 aa, Artificial Sequence
  Artificially Synthesized Peptide
RFSWLSLL

SEQ ID NO: 988 - protein, 11 aa, Artificial Sequence
  Artificially Synthesized Peptide
RFSWLSLLVPF

SEQ ID NO: 989 - protein, 9 aa, Artificial Sequence
  Artificially Synthesized Peptide
RILTIPQSL

SEQ ID NO: 990 - protein, 8 aa, Artificial Sequence
  Artificially Synthesized Peptide
RIVGLLGF

SEQ ID NO: 991 - protein, 10 aa, Artificial Sequence
  Artificially Synthesized Peptide
RLKLIMPARF

SEQ ID NO: 992 - protein, 11 aa, Artificial Sequence
  Artificially Synthesized Peptide
RLKLIMPARFY

SEQ ID NO: 993 - protein, 9 aa, Artificial Sequence
  Artificially Synthesized Peptide
RLVVDFSQF

SEQ ID NO: 994 - protein, 11 aa, Artificial Sequence
  Artificially Synthesized Peptide
RTPARVTGGVF

SEQ ID NO: 995 - protein, 8 aa, Artificial Sequence
  Artificially Synthesized Peptide
RVAEDLNL

SEQ ID NO: 996 - protein, 11 aa, Artificial Sequence
  Artificially Synthesized Peptide
RVAEDLNLGNL

SEQ ID NO: 997 - protein, 8 aa, Artificial Sequence
  Artificially Synthesized Peptide
RVHFASPL

SEQ ID NO: 998 - protein, 8 aa, Artificial Sequence
  Artificially Synthesized Peptide
RVTGGVFL

SEQ ID NO: 999 - protein, 8 aa, Artificial Sequence
  Artificially Synthesized Peptide
RWGYSLNF

SEQ ID NO: 1000 - protein, 9 aa, Artificial Sequence
  Artificially Synthesized Peptide
RWGYSLNFM

SEQ ID NO: 1001 - protein, 11 aa, Artificial Sequence
  Artificially Synthesized Peptide
RWGYSLNFMGY

SEQ ID NO: 1002 - protein, 8 aa, Artificial Sequence
  Artificially Synthesized Peptide
RWMCLRRF

SEQ ID NO: 1003 - protein, 9 aa, Artificial Sequence
  Artificially Synthesized Peptide
RWMCLRRFI

SEQ ID NO: 1004 - protein, 10 aa, Artificial Sequence
  Artificially Synthesized Peptide
RWMCLRRFII

SEQ ID NO: 1005 - protein, 11 aa, Artificial Sequence
  Artificially Synthesized Peptide
RWMCLRRFIIF

SEQ ID NO: 1006 - protein, 9 aa, Artificial Sequence
  Artificially Synthesized Peptide
SFCGSPYSW

SEQ ID NO: 1007 - protein, 8 aa, Artificial Sequence
  Artificially Synthesized Peptide
SFLPSDFF

SEQ ID NO: 1008 - protein, 9 aa, Artificial Sequence
  Artificially Synthesized Peptide
SFVYVPSAL

SEQ ID NO: 1009 - protein, 11 aa, Artificial Sequence
  Artificially Synthesized Peptide
SIPWTHKVGNF

SEQ ID NO: 1010 - protein, 9 aa, Artificial Sequence
  Artificially Synthesized Peptide
SLDSWWTSL

SEQ ID NO: 1011 - protein, 11 aa, Artificial Sequence
  Artificially Synthesized Peptide
SLDSWWTSLNF

SEQ ID NO: 1012 - protein, 8 aa, Artificial Sequence
  Artificially Synthesized Peptide
SLDVSAAF

SEQ ID NO: 1013 - protein, 9 aa, Artificial Sequence
  Artificially Synthesized Peptide
SLDVSAAFY

SEQ ID NO: 1014 - protein, 9 aa, Artificial Sequence
  Artificially Synthesized Peptide
SLLVPFVQW

SEQ ID NO: 1015 - protein, 10 aa, Artificial Sequence
  Artificially Synthesized Peptide
SLLVPFVQWF

SEQ ID NO: 1016 - protein, 9 aa, Artificial Sequence
  Artificially Synthesized Peptide
SLNFMGYVI

SEQ ID NO: 1017 - protein, 10 aa, Artificial Sequence
  Artificially Synthesized Peptide
SLRGLPVCAF

SEQ ID NO: 1018 - protein, 10 aa, Artificial Sequence
  Artificially Synthesized Peptide
SLTNLLSSNL

SEQ ID NO: 1019 - protein, 8 aa, Artificial Sequence
  Artificially Synthesized Peptide
STTDLEAY

SEQ ID NO: 1020 - protein, 9 aa, Artificial Sequence
  Artificially Synthesized Peptide
STTDLEAYF

SEQ ID NO: 1021 - protein, 8 aa, Artificial Sequence
  Artificially Synthesized Peptide
SVPNPLGF

SEQ ID NO: 1022 - protein, 8 aa, Artificial Sequence
  Artificially Synthesized Peptide
SVQHLESL

SEQ ID NO: 1023 - protein, 9 aa, Artificial Sequence
  Artificially Synthesized Peptide
SVRFSWLSL

SEQ ID NO: 1024 - protein, 10 aa, Artificial Sequence
  Artificially Synthesized Peptide
SVRFSWLSLL

SEQ ID NO: 1025 - protein, 8 aa, Artificial Sequence
  Artificially Synthesized Peptide
SVVLSRKY

SEQ ID NO: 1026 - protein, 11 aa, Artificial Sequence
  Artificially Synthesized Peptide
SVVLSRKYTSF

SEQ ID NO: 1027 - protein, 11 aa, Artificial Sequence
  Artificially Synthesized Peptide
SVVRRAFPHCL

SEQ ID NO: 1028 - protein, 11 aa, Artificial Sequence
  Artificially Synthesized Peptide
SWLSLDVSAAF

SEQ ID NO: 1029 - protein, 9 aa, Artificial Sequence
  Artificially Synthesized Peptide
SWLSLLVPF

SEQ ID NO: 1030 - protein, 10 aa, Artificial Sequence
  Artificially Synthesized Peptide
SWPKFAVPNL

SEQ ID NO: 1031 - protein, 8 aa, Artificial Sequence
  Artificially Synthesized Peptide
SWWTSLNF

SEQ ID NO: 1032 - protein, 9 aa, Artificial Sequence
  Artificially Synthesized Peptide
SWWTSLNFL

SEQ ID NO: 1033 - protein, 8 aa, Artificial Sequence
  Artificially Synthesized Peptide
SYMDDVVL

SEQ ID NO: 1034 - protein, 8 aa, Artificial Sequence
  Artificially Synthesized Peptide
SYQHFRKL

SEQ ID NO: 1035 - protein, 9 aa, Artificial Sequence
  Artificially Synthesized Peptide
SYQHFRKLL

SEQ ID NO: 1036 - protein, 10 aa, Artificial Sequence
  Artificially Synthesized Peptide
SYQHFRKLLL

SEQ ID NO: 1037 - protein, 11 aa, Artificial Sequence
  Artificially Synthesized Peptide
SYQHFRKLLLL

SEQ ID NO: 1038 - protein, 8 aa, Artificial Sequence
  Artificially Synthesized Peptide
TFGRETVL

SEQ ID NO: 1039 - protein, 10 aa, Artificial Sequence
  Artificially Synthesized Peptide
TFGRETVLEY

SEQ ID NO: 1040 - protein, 11 aa, Artificial Sequence
  Artificially Synthesized Peptide
TFGRETVLEYL

SEQ ID NO: 1041 - protein, 9 aa, Artificial Sequence
  Artificially Synthesized Peptide
TFSPTYKAF

SEQ ID NO: 1042 - protein, 10 aa, Artificial Sequence
  Artificially Synthesized Peptide
TFSPTYKAFL

SEQ ID NO: 1043 - protein, 9 aa, Artificial Sequence
  Artificially Synthesized Peptide
TIPQSLDSW

SEQ ID NO: 1044 - protein, 10 aa, Artificial Sequence
  Artificially Synthesized Peptide
TIPQSLDSWW

SEQ ID NO: 1045 - protein, 8 aa, Artificial Sequence
  Artificially Synthesized Peptide
TLWKAGIL

SEQ ID NO: 1046 - protein, 9 aa, Artificial Sequence
  Artificially Synthesized Peptide
TLWKAGILY

SEQ ID NO: 1047 - protein, 8 aa, Artificial Sequence
  Artificially Synthesized Peptide
TTDLEAYF

SEQ ID NO: 1048 - protein, 8 aa, Artificial Sequence
  Artificially Synthesized Peptide
TTGRTSLY

SEQ ID NO: 1049 - protein, 8 aa, Artificial Sequence
  Artificially Synthesized Peptide
TVNEKRRL

SEQ ID NO: 1050 - protein, 9 aa, Artificial Sequence
  Artificially Synthesized Peptide
TVQASKLCL

SEQ ID NO: 1051 - protein, 11 aa, Artificial Sequence
  Artificially Synthesized Peptide
TVQASKLCLGW

SEQ ID NO: 1052 - protein, 8 aa, Artificial Sequence
  Artificially Synthesized Peptide
TVWLSVIW

SEQ ID NO: 1053 - protein, 9 aa, Artificial Sequence
  Artificially Synthesized Peptide
TVWLSVIWM

SEQ ID NO: 1054 - protein, 10 aa, Artificial Sequence
  Artificially Synthesized Peptide
VFADATPTGW

SEQ ID NO: 1055 - protein, 11 aa, Artificial Sequence
  Artificially Synthesized Peptide
VFVLGGCRHKL

SEQ ID NO: 1056 - protein, 10 aa, Artificial Sequence
  Artificially Synthesized Peptide
VLGAKSVQHL

SEQ ID NO: 1057 - protein, 9 aa, Artificial Sequence
  Artificially Synthesized Peptide
VLGGCRHKL

SEQ ID NO: 1058 - protein, 9 aa, Artificial Sequence
  Artificially Synthesized Peptide
VLHKRTLGL

SEQ ID NO: 1059 - protein, 8 aa, Artificial Sequence
  Artificially Synthesized Peptide
VLLDYQGM

SEQ ID NO: 1060 - protein, 9 aa, Artificial Sequence
  Artificially Synthesized Peptide
VLLDYQGML

SEQ ID NO: 1061 - protein, 8 aa, Artificial Sequence
  Artificially Synthesized Peptide
VLQAGFFL

SEQ ID NO: 1062 - protein, 9 aa, Artificial Sequence
  Artificially Synthesized Peptide
VLQAGFFLL

SEQ ID NO: 1063 - protein, 9 aa, Artificial Sequence
  Artificially Synthesized Peptide
VLSRKYTSF

SEQ ID NO: 1064 - protein, 11 aa, Artificial Sequence
  Artificially Synthesized Peptide
VLSRKYTSFPW

SEQ ID NO: 1065 - protein, 11 aa, Artificial Sequence
  Artificially Synthesized Peptide
VVLGAKSVQHL

SEQ ID NO: 1066 - protein, 10 aa, Artificial Sequence
  Artificially Synthesized Peptide
VVLSRKYTSF

SEQ ID NO: 1067 - protein, 10 aa, Artificial Sequence
  Artificially Synthesized Peptide
VVRRAFPHCL

SEQ ID NO: 1068 - protein, 9 aa, Artificial Sequence
  Artificially Synthesized Peptide
VWIRTPPAY

SEQ ID NO: 1069 - protein, 8 aa, Artificial Sequence
  Artificially Synthesized Peptide
VWLSVIWM

SEQ ID NO: 1070 - protein, 9 aa, Artificial Sequence
  Artificially Synthesized Peptide
WFHISCLTF

SEQ ID NO: 1071 - protein, 10 aa, Artificial Sequence
  Artificially Synthesized Peptide
WFVGLSPTVW

SEQ ID NO: 1072 - protein, 11 aa, Artificial Sequence
  Artificially Synthesized Peptide
WFVGLSPTVWL

SEQ ID NO: 1073 - protein, 8 aa, Artificial Sequence
  Artificially Synthesized Peptide
WILRGTSF

SEQ ID NO: 1074 - protein, 10 aa, Artificial Sequence
  Artificially Synthesized Peptide
WILRGTSFVY

SEQ ID NO: 1075 - protein, 8 aa, Artificial Sequence
  Artificially Synthesized Peptide
WIRTPPAY

SEQ ID NO: 1076 - protein, 9 aa, Artificial Sequence
  Artificially Synthesized Peptide
WLLGCAANW

SEQ ID NO: 1077 - protein, 10 aa, Artificial Sequence
  Artificially Synthesized Peptide
WLLGCAANWI

SEQ ID NO: 1078 - protein, 11 aa, Artificial Sequence
  Artificially Synthesized Peptide
WLLGCAANWIL

SEQ ID NO: 1079 - protein, 10 aa, Artificial Sequence
  Artificially Synthesized Peptide
WLSLDVSAAF

SEQ ID NO: 1080 - protein, 11 aa, Artificial Sequence
  Artificially Synthesized Peptide
WLSLDVSAAFY

SEQ ID NO: 1081 - protein, 8 aa, Artificial Sequence
  Artificially Synthesized Peptide
WLSLLVPF

SEQ ID NO: 1082 - protein, 11 aa, Artificial Sequence
  Artificially Synthesized Peptide
WLSLLVPFVQW

SEQ ID NO: 1083 - protein, 10 aa, Artificial Sequence
  Artificially Synthesized Peptide
WLWGMDIDPY

SEQ ID NO: 1084 - protein, 8 aa, Artificial Sequence
  Artificially Synthesized Peptide
WMCLRRFI

SEQ ID NO: 1085 - protein, 9 aa, Artificial Sequence
  Artificially Synthesized Peptide
WMCLRRFII

SEQ ID NO: 1086 - protein, 10 aa, Artificial Sequence
  Artificially Synthesized Peptide
WMCLRRFIIF

SEQ ID NO: 1087 - protein, 11 aa, Artificial Sequence
  Artificially Synthesized Peptide
WMCLRRFIIFL

SEQ ID NO: 1088 - protein, 10 aa, Artificial Sequence
  Artificially Synthesized Peptide
WMMWYWGPSL

SEQ ID NO: 1089 - protein, 11 aa, Artificial Sequence
  Artificially Synthesized Peptide
WMMWYWGPSLY

SEQ ID NO: 1090 - protein, 8 aa, Artificial Sequence
  Artificially Synthesized Peptide
WTHKVGNF

SEQ ID NO: 1091 - protein, 11 aa, Artificial Sequence
  Artificially Synthesized Peptide
WTHKVGNFTGL

SEQ ID NO: 1092 - protein, 8 aa, Artificial Sequence
  Artificially Synthesized Peptide
WWTSLNFL

SEQ ID NO: 1093 - protein, 8 aa, Artificial Sequence
  Artificially Synthesized Peptide
WYWGPSLY

SEQ ID NO: 1094 - protein, 10 aa, Artificial Sequence
  Artificially Synthesized Peptide
YLHTLWKAGI

SEQ ID NO: 1095 - protein, 11 aa, Artificial Sequence
  Artificially Synthesized Peptide
YLHTLWKAGIL

SEQ ID NO: 1096 - protein, 8 aa, Artificial Sequence
  Artificially Synthesized Peptide
YLPLDKGI

SEQ ID NO: 1097 - protein, 11 aa, Artificial Sequence
  Artificially Synthesized Peptide
YLPLDKGIKPY

SEQ ID NO: 1098 - protein, 8 aa, Artificial Sequence
  Artificially Synthesized Peptide
YLVSFGVW

SEQ ID NO: 1099 - protein, 9 aa, Artificial Sequence
  Artificially Synthesized Peptide
YLVSFGVWI

SEQ ID NO: 1100 - protein, 8 aa, Artificial Sequence
  Artificially Synthesized Peptide
YTSFPWLL

SEQ ID NO: 1101 - protein, 9 aa, Artificial Sequence
  Artificially Synthesized Peptide
APCNFFTSA

SEQ ID NO: 1102 - protein, 8 aa, Artificial Sequence
  Artificially Synthesized Peptide
APFTQCGY

SEQ ID NO: 1103 - protein, 10 aa, Artificial Sequence
  Artificially Synthesized Peptide
APFTQCGYPA

SEQ ID NO: 1104 - protein, 11 aa, Artificial Sequence
  Artificially Synthesized Peptide
APFTQCGYPAL

SEQ ID NO: 1105 - protein, 9 aa, Artificial Sequence
  Artificially Synthesized Peptide
CPGYRWMCL

SEQ ID NO: 1106 - protein, 9 aa, Artificial Sequence
  Artificially Synthesized Peptide
CPTVQASKL

SEQ ID NO: 1107 - protein, 11 aa, Artificial Sequence
  Artificially Synthesized Peptide
CPTVQASKLCL

SEQ ID NO: 1108 - protein, 9 aa, Artificial Sequence
  Artificially Synthesized Peptide
DPARDVLCL

SEQ ID NO: 1109 - protein, 8 aa, Artificial Sequence
  Artificially Synthesized Peptide
DPRVRGLY

SEQ ID NO: 1110 - protein, 9 aa, Artificial Sequence
  Artificially Synthesized Peptide
DPSRGRLGL

SEQ ID NO: 1111 - protein, 8 aa, Artificial Sequence
  Artificially Synthesized Peptide
DPYKEFGA

SEQ ID NO: 1112 - protein, 11 aa, Artificial Sequence
  Artificially Synthesized Peptide
FPAGGSSSGTV

SEQ ID NO: 1113 - protein, 9 aa, Artificial Sequence
  Artificially Synthesized Peptide
FPDHQLDPA

SEQ ID NO: 1114 - protein, 10 aa, Artificial Sequence
  Artificially Synthesized Peptide
FPDHQLDPAF

SEQ ID NO: 1115 - protein, 9 aa, Artificial Sequence
  Artificially Synthesized Peptide
FPHCLAFSY

SEQ ID NO: 1116 - protein, 10 aa, Artificial Sequence
  Artificially Synthesized Peptide
FPHCLAFSYM

SEQ ID NO: 1117 - protein, 8 aa, Artificial Sequence
  Artificially Synthesized Peptide
FPWLLGCA

SEQ ID NO: 1118 - protein, 9 aa, Artificial Sequence
  Artificially Synthesized Peptide
FPWLLGCAA

SEQ ID NO: 1119 - protein, 11 aa, Artificial Sequence
  Artificially Synthesized Peptide
FPWLLGCAANW

SEQ ID NO: 1120 - protein, 10 aa, Artificial Sequence
  Artificially Synthesized Peptide
GPCALRFTSA

SEQ ID NO: 1121 - protein, 10 aa, Artificial Sequence
  Artificially Synthesized Peptide
GPLEEELPRL

SEQ ID NO: 1122 - protein, 11 aa, Artificial Sequence
  Artificially Synthesized Peptide
GPLEEELPRLA

SEQ ID NO: 1123 - protein, 8 aa, Artificial Sequence
  Artificially Synthesized Peptide
GPLLVLQA

SEQ ID NO: 1124 - protein, 10 aa, Artificial Sequence
  Artificially Synthesized Peptide
GPLLVLQAGF

SEQ ID NO: 1125 - protein, 11 aa, Artificial Sequence
  Artificially Synthesized Peptide
GPLLVLQAGFF

SEQ ID NO: 1126 - protein, 11 aa, Artificial Sequence
  Artificially Synthesized Peptide
GPLTVNEKRRL

SEQ ID NO: 1127 - protein, 8 aa, Artificial Sequence
  Artificially Synthesized Peptide
HPAAMPHL

SEQ ID NO: 1128 - protein, 9 aa, Artificial Sequence
  Artificially Synthesized Peptide
HPAAMPHLL

SEQ ID NO: 1129 - protein, 10 aa, Artificial Sequence
  Artificially Synthesized Peptide
HPAAMPHLLV

SEQ ID NO: 1130 - protein, 10 aa, Artificial Sequence
  Artificially Synthesized Peptide
HPIILGFRKI

SEQ ID NO: 1131 - protein, 8 aa, Artificial Sequence
  Artificially Synthesized Peptide
IPIPSSWA

SEQ ID NO: 1132 - protein, 9 aa, Artificial Sequence
  Artificially Synthesized Peptide
IPIPSSWAF

SEQ ID NO: 1133 - protein, 10 aa, Artificial Sequence
  Artificially Synthesized Peptide
IPIPSSWAFA

SEQ ID NO: 1134 - protein, 10 aa, Artificial Sequence
  Artificially Synthesized Peptide
IPMGVGLSPF

SEQ ID NO: 1135 - protein, 11 aa, Artificial Sequence
  Artificially Synthesized Peptide
IPMGVGLSPFL

SEQ ID NO: 1136 - protein, 8 aa, Artificial Sequence
  Artificially Synthesized Peptide
IPQSLDSW

SEQ ID NO: 1137 - protein, 9 aa, Artificial Sequence
  Artificially Synthesized Peptide
IPQSLDSWW

SEQ ID NO: 1138 - protein, 8 aa, Artificial Sequence
  Artificially Synthesized Peptide
IPSSWAFA

SEQ ID NO: 1139 - protein, 10 aa, Artificial Sequence
  Artificially Synthesized Peptide
IPWTHKVGNF

SEQ ID NO: 1140 - protein, 8 aa, Artificial Sequence
  Artificially Synthesized Peptide
LPIFFCLW

SEQ ID NO: 1141 - protein, 9 aa, Artificial Sequence
  Artificially Synthesized Peptide
LPIFFCLWV

SEQ ID NO: 1142 - protein, 10 aa, Artificial Sequence
  Artificially Synthesized Peptide
LPIFFCLWVY

SEQ ID NO: 1143 - protein, 11 aa, Artificial Sequence
  Artificially Synthesized Peptide
LPIFFCLWVYI

SEQ ID NO: 1144 - protein, 8 aa, Artificial Sequence
  Artificially Synthesized Peptide
LPIHTAEL

SEQ ID NO: 1145 - protein, 9 aa, Artificial Sequence
  Artificially Synthesized Peptide
LPIHTAELL

SEQ ID NO: 1146 - protein, 10 aa, Artificial Sequence
  Artificially Synthesized Peptide
LPIHTAELLA

SEQ ID NO: 1147 - protein, 11 aa, Artificial Sequence
  Artificially Synthesized Peptide
LPIHTAELLAA

SEQ ID NO: 1148 - protein, 10 aa, Artificial Sequence
  Artificially Synthesized Peptide
LPKVLHKRTL

SEQ ID NO: 1149 - protein, 10 aa, Artificial Sequence
  Artificially Synthesized Peptide
LPLDKGIKPY

SEQ ID NO: 1150 - protein, 11 aa, Artificial Sequence
  Artificially Synthesized Peptide
LPLDKGIKPYY

SEQ ID NO: 1151 - protein, 9 aa, Artificial Sequence
  Artificially Synthesized Peptide
LPVCAFSSA

SEQ ID NO: 1152 - protein, 9 aa, Artificial Sequence
  Artificially Synthesized Peptide
LPVNRPIDW

SEQ ID NO: 1153 - protein, 11 aa, Artificial Sequence
  Artificially Synthesized Peptide
LPVNRPIDWKV

SEQ ID NO: 1154 - protein, 11 aa, Artificial Sequence
  Artificially Synthesized Peptide
MPHLLVGSSGL

SEQ ID NO: 1155 - protein, 8 aa, Artificial Sequence
  Artificially Synthesized Peptide
MPLSYQHF

SEQ ID NO: 1156 - protein, 11 aa, Artificial Sequence
  Artificially Synthesized Peptide
MPLSYQHFRKL

SEQ ID NO: 1157 - protein, 11 aa, Artificial Sequence
  Artificially Synthesized Peptide
NPADDPSRGRL

SEQ ID NO: 1158 - protein, 11 aa, Artificial Sequence
  Artificially Synthesized Peptide
NPLGFFPDHQL

SEQ ID NO: 1159 - protein, 8 aa, Artificial Sequence
  Artificially Synthesized Peptide
NPNKTKRW

SEQ ID NO: 1160 - protein, 10 aa, Artificial Sequence
  Artificially Synthesized Peptide
NPNKTKRWGY

SEQ ID NO: 1161 - protein, 9 aa, Artificial Sequence
  Artificially Synthesized Peptide
PPAYRPPNA

SEQ ID NO: 1162 - protein, 11 aa, Artificial Sequence
  Artificially Synthesized Peptide
PPAYRPPNAPI

SEQ ID NO: 1163 - protein, 9 aa, Artificial Sequence
  Artificially Synthesized Peptide
PPHGGLLGW

SEQ ID NO: 1164 - protein, 10 aa, Artificial Sequence
  Artificially Synthesized Peptide
PPNAPILSTL

SEQ ID NO: 1165 - protein, 11 aa, Artificial Sequence
  Artificially Synthesized Peptide
RPIDWKVCQRI

SEQ ID NO: 1166 - protein, 8 aa, Artificial Sequence
  Artificially Synthesized Peptide
RPPNAPIL

SEQ ID NO: 1167 - protein, 11 aa, Artificial Sequence
  Artificially Synthesized Peptide
RPPNAPILSTL

SEQ ID NO: 1168 - protein, 11 aa, Artificial Sequence
  Artificially Synthesized Peptide
SPEHCSPHHTA

SEQ ID NO: 1169 - protein, 8 aa, Artificial Sequence
  Artificially Synthesized Peptide
SPFLLAQF

SEQ ID NO: 1170 - protein, 11 aa, Artificial Sequence
  Artificially Synthesized Peptide
SPFLLAQFTSA

SEQ ID NO: 1171 - protein, 10 aa, Artificial Sequence
  Artificially Synthesized Peptide
SPHHTALRQA

SEQ ID NO: 1172 - protein, 11 aa, Artificial Sequence
  Artificially Synthesized Peptide
SPHHTALRQAI

SEQ ID NO: 1173 - protein, 8 aa, Artificial Sequence
  Artificially Synthesized Peptide
SPQAQGIL

SEQ ID NO: 1174 - protein, 8 aa, Artificial Sequence
  Artificially Synthesized Peptide
SPSVPSHL

SEQ ID NO: 1175 - protein, 8 aa, Artificial Sequence
  Artificially Synthesized Peptide
SPTVWLSV

SEQ ID NO: 1176 - protein, 9 aa, Artificial Sequence
  Artificially Synthesized Peptide
SPTVWLSVI

SEQ ID NO: 1177 - protein, 10 aa, Artificial Sequence
  Artificially Synthesized Peptide
SPTVWLSVIW

SEQ ID NO: 1178 - protein, 11 aa, Artificial Sequence
  Artificially Synthesized Peptide
SPTVWLSVIWM

SEQ ID NO: 1179 - protein, 8 aa, Artificial Sequence
  Artificially Synthesized Peptide
SPTYKAFL

SEQ ID NO: 1180 - protein, 9 aa, Artificial Sequence
  Artificially Synthesized Peptide
TPARVTGGV

SEQ ID NO: 1181 - protein, 10 aa, Artificial Sequence
  Artificially Synthesized Peptide
TPARVTGGVF

SEQ ID NO: 1182 - protein, 11 aa, Artificial Sequence
  Artificially Synthesized Peptide
TPARVTGGVFL

SEQ ID NO: 1183 - protein, 10 aa, Artificial Sequence
  Artificially Synthesized Peptide
TPPAYRPPNA

SEQ ID NO: 1184 - protein, 8 aa, Artificial Sequence
  Artificially Synthesized Peptide
TPPHGGLL

SEQ ID NO: 1185 - protein, 10 aa, Artificial Sequence
  Artificially Synthesized Peptide
TPPHGGLLGW

SEQ ID NO: 1186 - protein, 8 aa, Artificial Sequence
  Artificially Synthesized Peptide
TPTGWGLA

SEQ ID NO: 1187 - protein, 9 aa, Artificial Sequence
  Artificially Synthesized Peptide
TPTGWGLAI

SEQ ID NO: 1188 - protein, 8 aa, Artificial Sequence
  Artificially Synthesized Peptide
VPFVQWFV

SEQ ID NO: 1189 - protein, 10 aa, Artificial Sequence
  Artificially Synthesized Peptide
VPFVQWFVGL

SEQ ID NO: 1190 - protein, 10 aa, Artificial Sequence
  Artificially Synthesized Peptide
VPNLQSLTNL

SEQ ID NO: 1191 - protein, 11 aa, Artificial Sequence
  Artificially Synthesized Peptide
VPNLQSLTNLL

SEQ ID NO: 1192 - protein, 8 aa, Artificial Sequence
  Artificially Synthesized Peptide
VPSALNPA

SEQ ID NO: 1193 - protein, 9 aa, Artificial Sequence
  Artificially Synthesized Peptide
WPKFAVPNL

SEQ ID NO: 1194 - protein, 8 aa, Artificial Sequence
  Artificially Synthesized Peptide
YPALMPLY

SEQ ID NO: 1195 - protein, 9 aa, Artificial Sequence
  Artificially Synthesized Peptide
YPALMPLYA

SEQ ID NO: 1196 - protein, 11 aa, Artificial Sequence
  Artificially Synthesized Peptide
YPALMPLYACI

SEQ ID NO: 1197 - skipped

SEQ ID NO: 1198 - protein, 8 aa, Artificial Sequence
  Artificially Synthesized Peptide
AHLSLRGL

SEQ ID NO: 1199 - protein, 8 aa, Artificial Sequence
  Artificially Synthesized Peptide
ARVTGGVF

SEQ ID NO: 1200 - protein, 8 aa, Artificial Sequence
  Artificially Synthesized Peptide
DHGAHLSL

SEQ ID NO: 1201 - protein, 8 aa, Artificial Sequence
  Artificially Synthesized Peptide
DHQLDPAF

SEQ ID NO: 1202 - protein, 8 aa, Artificial Sequence
  Artificially Synthesized Peptide
DKGIKPYY

SEQ ID NO: 1203 - protein, 8 aa, Artificial Sequence
  Artificially Synthesized Peptide
FHISCLTF

SEQ ID NO: 1204 - protein, 8 aa, Artificial Sequence
  Artificially Synthesized Peptide
FRKIPMGV

SEQ ID NO: 1205 - protein, 8 aa, Artificial Sequence
  Artificially Synthesized Peptide
GRETVLEY

SEQ ID NO: 1206 - protein, 8 aa, Artificial Sequence
  Artificially Synthesized Peptide
HHTALRQA

SEQ ID NO: 1207 - protein, 8 aa, Artificial Sequence
  Artificially Synthesized Peptide
IHTAELLA

SEQ ID NO: 1208 - protein, 8 aa, Artificial Sequence
  Artificially Synthesized Peptide
LHKRTLGL

SEQ ID NO: 1209 - protein, 8 aa, Artificial Sequence
  Artificially Synthesized Peptide
LHLYSHPI

SEQ ID NO: 1210 - protein, 8 aa, Artificial Sequence
  Artificially Synthesized Peptide
LRGLPVCA

SEQ ID NO: 1211 - protein, 8 aa, Artificial Sequence
  Artificially Synthesized Peptide
LRGTSFVY

SEQ ID NO: 1212 - protein, 8 aa, Artificial Sequence
  Artificially Synthesized Peptide
LRQAILCW

SEQ ID NO: 1213 - protein, 8 aa, Artificial Sequence
  Artificially Synthesized Peptide
LRRFIIFL

SEQ ID NO: 1214 - protein, 8 aa, Artificial Sequence
  Artificially Synthesized Peptide
NKTKRWGY

SEQ ID NO: 1215 - protein, 8 aa, Artificial Sequence
  Artificially Synthesized Peptide
NRPIDWKV

SEQ ID NO: 1216 - protein, 8 aa, Artificial Sequence
  Artificially Synthesized Peptide
NRRVAEDL

SEQ ID NO: 1217 - protein, 8 aa, Artificial Sequence
  Artificially Synthesized Peptide
PHCLAFSY

SEQ ID NO: 1218 - protein, 8 aa, Artificial Sequence
  Artificially Synthesized Peptide
PHGGLLGW

SEQ ID NO: 1219 - protein, 8 aa, Artificial Sequence
  Artificially Synthesized Peptide
PKFAVPNL

SEQ ID NO: 1220 - protein, 8 aa, Artificial Sequence
  Artificially Synthesized Peptide
QHFRKLLL

SEQ ID NO: 1221 - protein, 8 aa, Artificial Sequence
  Artificially Synthesized Peptide
RHYLHTLW

SEQ ID NO: 1222 - protein, 8 aa, Artificial Sequence
  Artificially Synthesized Peptide
RKYTSFPW

SEQ ID NO: 1223 - protein, 8 aa, Artificial Sequence
  Artificially Synthesized Peptide
RRAFPHCL

SEQ ID NO: 1224 - protein, 8 aa, Artificial Sequence
  Artificially Synthesized Peptide
RRFIIFLF

SEQ ID NO: 1225 - protein, 8 aa, Artificial Sequence
  Artificially Synthesized Peptide
SHPIILGF

SEQ ID NO: 1226 - protein, 8 aa, Artificial Sequence
  Artificially Synthesized Peptide
SKLCLGWL

SEQ ID NO: 1227 - protein, 8 aa, Artificial Sequence
  Artificially Synthesized Peptide
SRNLYVSL

SEQ ID NO: 1228 - protein, 8 aa, Artificial Sequence
  Artificially Synthesized Peptide
TKRWGYSL

SEQ ID NO: 1229 - protein, 8 aa, Artificial Sequence
  Artificially Synthesized Peptide
TRHYLHTL

SEQ ID NO: 1230 - protein, 8 aa, Artificial Sequence
  Artificially Synthesized Peptide
VRFSWLSL

SEQ ID NO: 1231 - protein, 8 aa, Artificial Sequence
  Artificially Synthesized Peptide
WKVCQRIV

SEQ ID NO: 1232 - protein, 8 aa, Artificial Sequence
  Artificially Synthesized Peptide
YRPPNAPI

SEQ ID NO: 1233 - protein, 9 aa, Artificial Sequence
  Artificially Synthesized Peptide
ARVTGGVFL

SEQ ID NO: 1234 - protein, 9 aa, Artificial Sequence
  Artificially Synthesized Peptide
EHCSPHHTA

SEQ ID NO: 1235 - protein, 9 aa, Artificial Sequence
  Artificially Synthesized Peptide
GRETVLEYL

SEQ ID NO: 1236 - protein, 9 aa, Artificial Sequence
  Artificially Synthesized Peptide
HHTALRQAI

SEQ ID NO: 1237 - protein, 9 aa, Artificial Sequence
  Artificially Synthesized Peptide
HKVGNFTGL

SEQ ID NO: 1238 - protein, 9 aa, Artificial Sequence
  Artificially Synthesized Peptide
IHTAELLAA

SEQ ID NO: 1239 - protein, 9 aa, Artificial Sequence
  Artificially Synthesized Peptide
KRWGYSLNF

SEQ ID NO: 1240 - protein, 9 aa, Artificial Sequence
  Artificially Synthesized Peptide
LHLYSHPII

SEQ ID NO: 1241 - protein, 9 aa, Artificial Sequence
  Artificially Synthesized Peptide
LHPAAMPHL

SEQ ID NO: 1242 - protein, 9 aa, Artificial Sequence
  Artificially Synthesized Peptide
LHTLWKAGI

SEQ ID NO: 1243 - protein, 9 aa, Artificial Sequence
  Artificially Synthesized Peptide
LKLIMPARF

SEQ ID NO: 1244 - protein, 9 aa, Artificial Sequence
  Artificially Synthesized Peptide
LRGLPVCAF

SEQ ID NO: 1245 - protein, 9 aa, Artificial Sequence
  Artificially Synthesized Peptide
LRGTSFVYV

SEQ ID NO: 1246 - protein, 9 aa, Artificial Sequence
  Artificially Synthesized Peptide
LRRFIIFLF

SEQ ID NO: 1247 - protein, 9 aa, Artificial Sequence
  Artificially Synthesized Peptide
PHCLAFSYM

SEQ ID NO: 1248 - protein, 9 aa, Artificial Sequence
  Artificially Synthesized Peptide
PHHTALRQA

SEQ ID NO: 1249 - protein, 9 aa, Artificial Sequence
  Artificially Synthesized Peptide
PKVLHKRTL

SEQ ID NO: 1250 - protein, 9 aa, Artificial Sequence
  Artificially Synthesized Peptide
QHFRKLLLL

SEQ ID NO: 1251 - protein, 9 aa, Artificial Sequence
  Artificially Synthesized Peptide
QRIVGLLGF

SEQ ID NO: 1252 - protein, 9 aa, Artificial Sequence
  Artificially Synthesized Peptide
RKIPMGVGL

SEQ ID NO: 1253 - protein, 9 aa, Artificial Sequence
  Artificially Synthesized Peptide
RKLPVNRPI

SEQ ID NO: 1254 - protein, 9 aa, Artificial Sequence
  Artificially Synthesized Peptide
RKYTSFPWL

SEQ ID NO: 1255 - protein, 9 aa, Artificial Sequence
  Artificially Synthesized Peptide
RRAFPHCLA

SEQ ID NO: 1256 - protein, 9 aa, Artificial Sequence
  Artificially Synthesized Peptide
RRFIIFLFI

SEQ ID NO: 1257 - protein, 9 aa, Artificial Sequence
  Artificially Synthesized Peptide
RRLKLIMPA

SEQ ID NO: 1258 - protein, 9 aa, Artificial Sequence
  Artificially Synthesized Peptide
RRVAEDLNL

SEQ ID NO: 1259 - protein, 9 aa, Artificial Sequence
  Artificially Synthesized Peptide
SKLCLGWLW

SEQ ID NO: 1260 - protein, 9 aa, Artificial Sequence
  Artificially Synthesized Peptide
SRKYTSFPW

SEQ ID NO: 1261 - protein, 9 aa, Artificial Sequence
  Artificially Synthesized Peptide
TRHYLHTLW

SEQ ID NO: 1262 - protein, 9 aa, Artificial Sequence
  Artificially Synthesized Peptide
VHFASPLHV

SEQ ID NO: 1263 - protein, 9 aa, Artificial Sequence
  Artificially Synthesized Peptide
VRFSWLSLL

SEQ ID NO: 1264 - protein, 9 aa, Artificial Sequence
  Artificially Synthesized Peptide
VRRAFPHCL

SEQ ID NO: 1265 - protein, 9 aa, Artificial Sequence
  Artificially Synthesized Peptide
YRPPNAPIL

SEQ ID NO: 1266 - protein, 9 aa, Artificial Sequence
  Artificially Synthesized Peptide
YRWMCLRRF

SEQ ID NO: 1267 - protein, 10 aa, Artificial Sequence
  Artificially Synthesized Peptide
AHLSLRGLPV

SEQ ID NO: 1268 - protein, 10 aa, Artificial Sequence
  Artificially Synthesized Peptide
AKSVQHLESL

SEQ ID NO: 1269 - protein, 10 aa, Artificial Sequence
  Artificially Synthesized Peptide
ARDVLCLRPV

SEQ ID NO: 1270 - protein, 10 aa, Artificial Sequence
  Artificially Synthesized Peptide
ARVTGGVFLV

SEQ ID NO: 1271 - protein, 10 aa, Artificial Sequence
  Artificially Synthesized Peptide
EHCSPHHTAL

SEQ ID NO: 1272 - protein, 10 aa, Artificial Sequence
  Artificially Synthesized Peptide
FRKIPMGVGL

SEQ ID NO: 1273 - protein, 10 aa, Artificial Sequence
  Artificially Synthesized Peptide
FRKLPVNRPI

SEQ ID NO: 1274 - protein, 10 aa, Artificial Sequence
  Artificially Synthesized Peptide
GRETVLEYLV

SEQ ID NO: 1275 - protein, 10 aa, Artificial Sequence
  Artificially Synthesized Peptide
HHTALRQAIL

SEQ ID NO: 1276 - protein, 10 aa, Artificial Sequence
  Artificially Synthesized Peptide
HKVGNFTGLY

SEQ ID NO: 1277 - protein, 10 aa, Artificial Sequence
  Artificially Synthesized Peptide
KRWGYSLNFM

SEQ ID NO: 1278 - protein, 10 aa, Artificial Sequence
  Artificially Synthesized Peptide
LHLYSHPIIL

SEQ ID NO: 1279 - protein, 10 aa, Artificial Sequence
  Artificially Synthesized Peptide
LHPAAMPHLL

SEQ ID NO: 1280 - protein, 10 aa, Artificial Sequence
  Artificially Synthesized Peptide
LHTLWKAGIL

SEQ ID NO: 1281 - protein, 10 aa, Artificial Sequence
  Artificially Synthesized Peptide
LKLIMPARFY

SEQ ID NO: 1282 - protein, 10 aa, Artificial Sequence
  Artificially Synthesized Peptide
LRRFIIFLFI

SEQ ID NO: 1283 - protein, 10 aa, Artificial Sequence
  Artificially Synthesized Peptide
NKTKRWGYSL

SEQ ID NO: 1284 - protein, 10 aa, Artificial Sequence
  Artificially Synthesized Peptide
NRRVAEDLNL

SEQ ID NO: 1285 - protein, 10 aa, Artificial Sequence
  Artificially Synthesized Peptide
PHHTALRQAI

SEQ ID NO: 1286 - protein, 10 aa, Artificial Sequence
  Artificially Synthesized Peptide
PHLLVGSSGL

SEQ ID NO: 1287 - protein, 10 aa, Artificial Sequence
  Artificially Synthesized Peptide
QRIVGLLGFA

SEQ ID NO: 1288 - protein, 10 aa, Artificial Sequence
  Artificially Synthesized Peptide
RHYLHTLWKA

SEQ ID NO: 1289 - protein, 10 aa, Artificial Sequence
  Artificially Synthesized Peptide
RKYTSFPWLL

SEQ ID NO: 1290 - protein, 10 aa, Artificial Sequence
  Artificially Synthesized Peptide
RRAFPHCLAF

SEQ ID NO: 1291 - protein, 10 aa, Artificial Sequence
  Artificially Synthesized Peptide
RRFIIFLFIL

SEQ ID NO: 1292 - protein, 10 aa, Artificial Sequence
  Artificially Synthesized Peptide
SRKYTSFPWL

SEQ ID NO: 1293 - protein, 10 aa, Artificial Sequence
  Artificially Synthesized Peptide
SRLVVDFSQF

SEQ ID NO: 1294 - protein, 10 aa, Artificial Sequence
  Artificially Synthesized Peptide
THKVGNFTGL

SEQ ID NO: 1295 - protein, 10 aa, Artificial Sequence
  Artificially Synthesized Peptide
TKRWGYSLNF

SEQ ID NO: 1296 - protein, 10 aa, Artificial Sequence
  Artificially Synthesized Peptide
TKYLPLDKGI

SEQ ID NO: 1297 - protein, 10 aa, Artificial Sequence
  Artificially Synthesized Peptide
TRILTIPQSL

SEQ ID NO: 1298 - protein, 10 aa, Artificial Sequence
  Artificially Synthesized Peptide
VHFASPLHVA

SEQ ID NO: 1299 - protein, 10 aa, Artificial Sequence
  Artificially Synthesized Peptide
VRFSWLSLLV

SEQ ID NO: 1300 - protein, 10 aa, Artificial Sequence
  Artificially Synthesized Peptide
VRRAFPHCLA

SEQ ID NO: 1301 - protein, 10 aa, Artificial Sequence
  Artificially Synthesized Peptide
WKVCQRIVGL

SEQ ID NO: 1302 - protein, 10 aa, Artificial Sequence
  Artificially Synthesized Peptide
YRWMCLRRFI

SEQ ID NO: 1303 - protein, 11 aa, Artificial Sequence
  Artificially Synthesized Peptide
DHGAHLSLRGL

SEQ ID NO: 1304 - protein, 11 aa, Artificial Sequence
  Artificially Synthesized Peptide
IHLNPNKTKRW

SEQ ID NO: 1305 - protein, 11 aa, Artificial Sequence
  Artificially Synthesized Peptide
IHTAELLAACF

SEQ ID NO: 1306 - protein, 11 aa, Artificial Sequence
  Artificially Synthesized Peptide
LHPAAMPHLLV

SEQ ID NO: 1307 - protein, 11 aa, Artificial Sequence
  Artificially Synthesized Peptide
LHTLWKAGILY

SEQ ID NO: 1308 - protein, 11 aa, Artificial Sequence
  Artificially Synthesized Peptide
LRQAILCWGEL

SEQ ID NO: 1309 - protein, 11 aa, Artificial Sequence
  Artificially Synthesized Peptide
LRRFIIFLFIL

SEQ ID NO: 1310 - protein, 11 aa, Artificial Sequence
  Artificially Synthesized Peptide
PHHTALRQAIL

SEQ ID NO: 1311 - protein, 11 aa, Artificial Sequence
  Artificially Synthesized Peptide
PKFAVPNLQSL

SEQ ID NO: 1312 - protein, 11 aa, Artificial Sequence
  Artificially Synthesized Peptide
PKVLHKRTLGL

SEQ ID NO: 1313 - protein, 11 aa, Artificial Sequence
  Artificially Synthesized Peptide
PRTPARVTGGV

SEQ ID NO: 1314 - protein, 11 aa, Artificial Sequence
  Artificially Synthesized Peptide
QRIVGLLGFAA

SEQ ID NO: 1315 - protein, 11 aa, Artificial Sequence
  Artificially Synthesized Peptide
RKLPVNRPIDW

SEQ ID NO: 1316 - protein, 11 aa, Artificial Sequence
  Artificially Synthesized Peptide
RRFIIFLFILL

SEQ ID NO: 1317 - protein, 11 aa, Artificial Sequence
  Artificially Synthesized Peptide
RRLKLIMPARF

SEQ ID NO: 1318 - protein, 11 aa, Artificial Sequence
  Artificially Synthesized Peptide
SHPIILGFRKI

SEQ ID NO: 1319 - protein, 11 aa, Artificial Sequence
  Artificially Synthesized Peptide
SKLCLGWLWGM

SEQ ID NO: 1320 - protein, 11 aa, Artificial Sequence
  Artificially Synthesized Peptide
SRKYTSFPWLL

SEQ ID NO: 1321 - protein, 11 aa, Artificial Sequence
  Artificially Synthesized Peptide
THKVGNFTGLY

SEQ ID NO: 1322 - protein, 11 aa, Artificial Sequence
  Artificially Synthesized Peptide
TKRWGYSLNFM

SEQ ID NO: 1323 - protein, 11 aa, Artificial Sequence
  Artificially Synthesized Peptide
TRHYLHTLWKA

SEQ ID NO: 1324 - protein, 11 aa, Artificial Sequence
  Artificially Synthesized Peptide
VHFASPLHVAW

SEQ ID NO: 1325 - protein, 11 aa, Artificial Sequence
  Artificially Synthesized Peptide
VRRAFPHCLAF

SEQ ID NO: 1326 - protein, 11 aa, Artificial Sequence
  Artificially Synthesized Peptide
WKVCQRIVGLL

SEQ ID NO: 1327 - protein, 11 aa, Artificial Sequence
  Artificially Synthesized Peptide
YRWMCLRRFII

SEQ ID NO: 1328 - protein, 8 aa, Artificial Sequence
  Artificially Synthesized Peptide
AAMPHLLV

SEQ ID NO: 1329 - protein, 8 aa, Artificial Sequence
  Artificially Synthesized Peptide
ASALYREA

SEQ ID NO: 1330 - protein, 8 aa, Artificial Sequence
  Artificially Synthesized Peptide
ASFCGSPY

SEQ ID NO: 1331 - protein, 8 aa, Artificial Sequence
  Artificially Synthesized Peptide
ASKLCLGW

SEQ ID NO: 1332 - protein, 8 aa, Artificial Sequence
  Artificially Synthesized Peptide
ASPLHVAW

SEQ ID NO: 1333 - protein, 8 aa, Artificial Sequence
  Artificially Synthesized Peptide
ASVRFSWL

SEQ ID NO: 1334 - protein, 8 aa, Artificial Sequence
  Artificially Synthesized Peptide
ATPTGWGL

SEQ ID NO: 1335 - protein, 8 aa, Artificial Sequence
  Artificially Synthesized Peptide
CALRFTSA

SEQ ID NO: 1336 - protein, 8 aa, Artificial Sequence
  Artificially Synthesized Peptide
CSPHHTAL

SEQ ID NO: 1337 - protein, 8 aa, Artificial Sequence
  Artificially Synthesized Peptide
CSVVRRAF

SEQ ID NO: 1338 - protein, 8 aa, Artificial Sequence
  Artificially Synthesized Peptide
ESRLVVDF

SEQ ID NO: 1339 - protein, 8 aa, Artificial Sequence
  Artificially Synthesized Peptide
ETVLEYLV

SEQ ID NO: 1340 - protein, 8 aa, Artificial Sequence
  Artificially Synthesized Peptide
FARSRSGA

SEQ ID NO: 1341 - protein, 8 aa, Artificial Sequence
  Artificially Synthesized Peptide
FASPLHVA

SEQ ID NO: 1342 - protein, 8 aa, Artificial Sequence
  Artificially Synthesized Peptide
FSPTYKAF

SEQ ID NO: 1343 - protein, 8 aa, Artificial Sequence
  Artificially Synthesized Peptide
FSSAGPCA

SEQ ID NO: 1344 - protein, 8 aa, Artificial Sequence
  Artificially Synthesized Peptide
FSWLSLLV

SEQ ID NO: 1345 - protein, 8 aa, Artificial Sequence
  Artificially Synthesized Peptide
FSYMDDVV

SEQ ID NO: 1346 - protein, 8 aa, Artificial Sequence
  Artificially Synthesized Peptide
FTQCGYPA

SEQ ID NO: 1347 - protein, 8 aa, Artificial Sequence
  Artificially Synthesized Peptide
FTSAICSV

SEQ ID NO: 1348 - protein, 8 aa, Artificial Sequence
  Artificially Synthesized Peptide
GAKSVQHL

SEQ ID NO: 1349 - protein, 8 aa, Artificial Sequence
  Artificially Synthesized Peptide
GTDNSVVL

SEQ ID NO: 1350 - protein, 8 aa, Artificial Sequence
  Artificially Synthesized Peptide
HTAELLAA

SEQ ID NO: 1351 - protein, 8 aa, Artificial Sequence
  Artificially Synthesized Peptide
HTALRQAI

SEQ ID NO: 1352 - protein, 8 aa, Artificial Sequence
  Artificially Synthesized Peptide
HTLWKAGI

SEQ ID NO: 1353 - protein, 8 aa, Artificial Sequence
  Artificially Synthesized Peptide
LAQFTSAI

SEQ ID NO: 1354 - protein, 8 aa, Artificial Sequence
  Artificially Synthesized Peptide
LSFLPSDF

SEQ ID NO: 1355 - protein, 8 aa, Artificial Sequence
  Artificially Synthesized Peptide
LSLDVSAA

SEQ ID NO: 1356 - protein, 8 aa, Artificial Sequence
  Artificially Synthesized Peptide
LSLLVPFV

SEQ ID NO: 1357 - protein, 8 aa, Artificial Sequence
  Artificially Synthesized Peptide
LSLRGLPV

SEQ ID NO: 1358 - protein, 8 aa, Artificial Sequence
  Artificially Synthesized Peptide
LSRKYTSF

SEQ ID NO: 1359 - protein, 8 aa, Artificial Sequence
  Artificially Synthesized Peptide
LSSNLSWL

SEQ ID NO: 1360 - protein, 8 aa, Artificial Sequence
  Artificially Synthesized Peptide
LSWLSLDV

SEQ ID NO: 1361 - protein, 8 aa, Artificial Sequence
  Artificially Synthesized Peptide
LTFGRETV

SEQ ID NO: 1362 - protein, 8 aa, Artificial Sequence
  Artificially Synthesized Peptide
MSTTDLEA

SEQ ID NO: 1363 - protein, 8 aa, Artificial Sequence
  Artificially Synthesized Peptide
NAPILSTL

SEQ ID NO: 1364 - protein, 8 aa, Artificial Sequence
  Artificially Synthesized Peptide
PAAMPHLL

SEQ ID NO: 1365 - protein, 8 aa, Artificial Sequence
  Artificially Synthesized Peptide
PALMPLYA

SEQ ID NO: 1366 - protein, 8 aa, Artificial Sequence
  Artificially Synthesized Peptide
PARDVLCL

SEQ ID NO: 1367 - protein, 8 aa, Artificial Sequence
  Artificially Synthesized Peptide
PARVTGGV

SEQ ID NO: 1368 - protein, 8 aa, Artificial Sequence
  Artificially Synthesized Peptide
PAYRPPNA

SEQ ID NO: 1369 - protein, 8 aa, Artificial Sequence
  Artificially Synthesized Peptide
PSRGRLGL

SEQ ID NO: 1370 - protein, 8 aa, Artificial Sequence
  Artificially Synthesized Peptide
PTGWGLAI

SEQ ID NO: 1371 - protein, 8 aa, Artificial Sequence
  Artificially Synthesized Peptide
PTTGRTSL

SEQ ID NO: 1372 - protein, 8 aa, Artificial Sequence
  Artificially Synthesized Peptide
PTVQASKL

SEQ ID NO: 1373 - protein, 8 aa, Artificial Sequence
  Artificially Synthesized Peptide
PTVWLSVI

SEQ ID NO: 1374 - protein, 8 aa, Artificial Sequence
  Artificially Synthesized Peptide
RAFPHCLA

SEQ ID NO: 1375 - protein, 8 aa, Artificial Sequence
  Artificially Synthesized Peptide
RTLGLSAM

SEQ ID NO: 1376 - protein, 8 aa, Artificial Sequence
  Artificially Synthesized Peptide
SALYREAL

SEQ ID NO: 1377 - protein, 8 aa, Artificial Sequence
  Artificially Synthesized Peptide
SSAGPCAL

SEQ ID NO: 1378 - protein, 8 aa, Artificial Sequence
  Artificially Synthesized Peptide
SSGTVNPV

SEQ ID NO: 1379 - protein, 8 aa, Artificial Sequence
  Artificially Synthesized Peptide
SSKPRQGM

SEQ ID NO: 1380 - protein, 8 aa, Artificial Sequence
  Artificially Synthesized Peptide
STLPETTV

SEQ ID NO: 1381 - protein, 8 aa, Artificial Sequence
  Artificially Synthesized Peptide
STTDLEAY

SEQ ID NO: 1382 - protein, 8 aa, Artificial Sequence
  Artificially Synthesized Peptide
TALRQAIL

SEQ ID NO: 1383 - protein, 8 aa, Artificial Sequence
  Artificially Synthesized Peptide
TSAICSVV

SEQ ID NO: 1384 - protein, 8 aa, Artificial Sequence
  Artificially Synthesized Peptide
TSGFLGPL

SEQ ID NO: 1385 - protein, 8 aa, Artificial Sequence
  Artificially Synthesized Peptide
TTDLEAYF

SEQ ID NO: 1386 - protein, 8 aa, Artificial Sequence
  Artificially Synthesized Peptide
TTGRTSLY

SEQ ID NO: 1387 - protein, 8 aa, Artificial Sequence
  Artificially Synthesized Peptide
VSWPKFAV

SEQ ID NO: 1388 - protein, 8 aa, Artificial Sequence
  Artificially Synthesized Peptide
VSYVNVNM

SEQ ID NO: 1389 - protein, 8 aa, Artificial Sequence
  Artificially Synthesized Peptide
VTGGVFLV

SEQ ID NO: 1390 - protein, 8 aa, Artificial Sequence
  Artificially Synthesized Peptide
WSPQAQGI

SEQ ID NO: 1391 - protein, 8 aa, Artificial Sequence
  Artificially Synthesized Peptide
WTHKVGNF

SEQ ID NO: 1392 - protein, 8 aa, Artificial Sequence
  Artificially Synthesized Peptide
YSLNFMGY

SEQ ID NO: 1393 - protein, 8 aa, Artificial Sequence
  Artificially Synthesized Peptide
YTSFPWLL

SEQ ID NO: 1394 - protein, 9 aa, Artificial Sequence
  Artificially Synthesized Peptide
AAPFTQCGY

SEQ ID NO: 1395 - protein, 9 aa, Artificial Sequence
  Artificially Synthesized Peptide
ASALYREAL

SEQ ID NO: 1396 - protein, 9 aa, Artificial Sequence
  Artificially Synthesized Peptide
ASKLCLGWL

SEQ ID NO: 1397 - protein, 9 aa, Artificial Sequence
  Artificially Synthesized Peptide
ATPTGWGLA

SEQ ID NO: 1398 - protein, 9 aa, Artificial Sequence
  Artificially Synthesized Peptide
CSRNLYVSL

SEQ ID NO: 1399 - protein, 9 aa, Artificial Sequence
  Artificially Synthesized Peptide
DATPTGWGL

SEQ ID NO: 1400 - protein, 9 aa, Artificial Sequence
  Artificially Synthesized Peptide
DSWWTSLNF

SEQ ID NO: 1401 - protein, 9 aa, Artificial Sequence
  Artificially Synthesized Peptide
EAGPLEEEL

SEQ ID NO: 1402 - protein, 9 aa, Artificial Sequence
  Artificially Synthesized Peptide
FADATPTGW

SEQ ID NO: 1403 - protein, 9 aa, Artificial Sequence
  Artificially Synthesized Peptide
FASPLHVAW

SEQ ID NO: 1404 - protein, 9 aa, Artificial Sequence
  Artificially Synthesized Peptide
FAVPNLQSL

SEQ ID NO: 1405 - protein, 9 aa, Artificial Sequence
  Artificially Synthesized Peptide
FSPTYKAFL

SEQ ID NO: 1406 - protein, 9 aa, Artificial Sequence
  Artificially Synthesized Peptide
FSSAGPCAL

SEQ ID NO: 1407 - protein, 9 aa, Artificial Sequence
  Artificially Synthesized Peptide
FSYMDDVVL

SEQ ID NO: 1408 - protein, 9 aa, Artificial Sequence
  Artificially Synthesized Peptide
FTFSPTYKA

SEQ ID NO: 1409 - protein, 9 aa, Artificial Sequence
  Artificially Synthesized Peptide
FTGLYSSTV

SEQ ID NO: 1410 - protein, 9 aa, Artificial Sequence
  Artificially Synthesized Peptide
FTQCGYPAL

SEQ ID NO: 1411 - protein, 9 aa, Artificial Sequence
  Artificially Synthesized Peptide
FTSAICSVV

SEQ ID NO: 1412 - protein, 9 aa, Artificial Sequence
  Artificially Synthesized Peptide
GAHLSLRGL

SEQ ID NO: 1413 - protein, 9 aa, Artificial Sequence
  Artificially Synthesized Peptide
HTALRQAIL

SEQ ID NO: 1414 - protein, 9 aa, Artificial Sequence
  Artificially Synthesized Peptide
HTLWKAGIL

SEQ ID NO: 1415 - protein, 9 aa, Artificial Sequence
  Artificially Synthesized Peptide
KSVQHLESL

SEQ ID NO: 1416 - protein, 9 aa, Artificial Sequence
  Artificially Synthesized Peptide
KTKRWGYSL

SEQ ID NO: 1417 - protein, 9 aa, Artificial Sequence
  Artificially Synthesized Peptide
LAFSYMDDV

SEQ ID NO: 1418 - protein, 9 aa, Artificial Sequence
  Artificially Synthesized Peptide
LSFLPSDFF

SEQ ID NO: 1419 - protein, 9 aa, Artificial Sequence
  Artificially Synthesized Peptide
LSLDVSAAF

SEQ ID NO: 1420 - protein, 9 aa, Artificial Sequence
  Artificially Synthesized Peptide
LSPFLLAQF

SEQ ID NO: 1421 - protein, 9 aa, Artificial Sequence
  Artificially Synthesized Peptide
LSPTVWLSV

SEQ ID NO: 1422 - protein, 9 aa, Artificial Sequence
  Artificially Synthesized Peptide
LSTLPETTV

SEQ ID NO: 1423 - protein, 9 aa, Artificial Sequence
  Artificially Synthesized Peptide
LSVPNPLGF

SEQ ID NO: 1424 - protein, 9 aa, Artificial Sequence
  Artificially Synthesized Peptide
LSYQHFRKL

SEQ ID NO: 1425 - protein, 9 aa, Artificial Sequence
  Artificially Synthesized Peptide
LTFGRETVL

SEQ ID NO: 1426 - protein, 9 aa, Artificial Sequence
  Artificially Synthesized Peptide
LTNLLSSNL

SEQ ID NO: 1427 - protein, 9 aa, Artificial Sequence
  Artificially Synthesized Peptide
LTVNEKRRL

SEQ ID NO: 1428 - protein, 9 aa, Artificial Sequence
  Artificially Synthesized Peptide
MSTTDLEAY

SEQ ID NO: 1429 - protein, 9 aa, Artificial Sequence
  Artificially Synthesized Peptide
NSVVLSRKY

SEQ ID NO: 1430 - protein, 9 aa, Artificial Sequence
  Artificially Synthesized Peptide
PAAMPHLLV

SEQ ID NO: 1431 - protein, 9 aa, Artificial Sequence
  Artificially Synthesized Peptide
PARVTGGVF

SEQ ID NO: 1432 - protein, 9 aa, Artificial Sequence
  Artificially Synthesized Peptide
PTTGRTSLY

SEQ ID NO: 1433 - protein, 9 aa, Artificial Sequence
  Artificially Synthesized Peptide
PTVWLSVIW

SEQ ID NO: 1434 - protein, 9 aa, Artificial Sequence
  Artificially Synthesized Peptide
QAFTFSPTY

SEQ ID NO: 1435 - protein, 9 aa, Artificial Sequence
  Artificially Synthesized Peptide
QAILCWGEL

SEQ ID NO: 1436 - protein, 9 aa, Artificial Sequence
  Artificially Synthesized Peptide
QASKLCLGW

SEQ ID NO: 1437 - protein, 9 aa, Artificial Sequence
  Artificially Synthesized Peptide
RAFPHCLAF

SEQ ID NO: 1438 - protein, 9 aa, Artificial Sequence
  Artificially Synthesized Peptide
RTGDPAPNM

SEQ ID NO: 1439 - protein, 9 aa, Artificial Sequence
  Artificially Synthesized Peptide
SAGPCALRF

SEQ ID NO: 1440 - protein, 9 aa, Artificial Sequence
  Artificially Synthesized Peptide
SASFCGSPY

SEQ ID NO: 1441 - protein, 9 aa, Artificial Sequence
  Artificially Synthesized Peptide
SSNLSWLSL

SEQ ID NO: 1442 - protein, 9 aa, Artificial Sequence
  Artificially Synthesized Peptide
SSSGTVNPV

SEQ ID NO: 1443 - protein, 9 aa, Artificial Sequence
  Artificially Synthesized Peptide
STLPETTVV

SEQ ID NO: 1444 - protein, 9 aa, Artificial Sequence
  Artificially Synthesized Peptide
STTDLEAYF

SEQ ID NO: 1445 - protein, 9 aa, Artificial Sequence
  Artificially Synthesized Peptide
TAELLAACF

SEQ ID NO: 1446 - protein, 9 aa, Artificial Sequence
  Artificially Synthesized Peptide
TASALYREA

SEQ ID NO: 1447 - protein, 9 aa, Artificial Sequence
  Artificially Synthesized Peptide
TSFVYVPSA

SEQ ID NO: 1448 - protein, 9 aa, Artificial Sequence
  Artificially Synthesized Peptide
TSGFLGPLL

SEQ ID NO: 1449 - protein, 9 aa, Artificial Sequence
  Artificially Synthesized Peptide
TTGRTSLYA

SEQ ID NO: 1450 - protein, 9 aa, Artificial Sequence
  Artificially Synthesized Peptide
VSIPWTHKV

SEQ ID NO: 1451 - protein, 9 aa, Artificial Sequence
  Artificially Synthesized Peptide
WSPQAQGIL

SEQ ID NO: 1452 - protein, 9 aa, Artificial Sequence
  Artificially Synthesized Peptide
WSSKPRQGM

SEQ ID NO: 1453 - protein, 9 aa, Artificial Sequence
  Artificially Synthesized Peptide
YSHPIILGF

SEQ ID NO: 1454 - protein, 9 aa, Artificial Sequence
  Artificially Synthesized Peptide
YSLNFMGYV

SEQ ID NO: 1455 - protein, 10 aa, Artificial Sequence
  Artificially Synthesized Peptide
ASFCGSPYSW

SEQ ID NO: 1456 - protein, 10 aa, Artificial Sequence
  Artificially Synthesized Peptide
ASKLCLGWLW

SEQ ID NO: 1457 - protein, 10 aa, Artificial Sequence
  Artificially Synthesized Peptide
ASVRFSWLSL

SEQ ID NO: 1458 - protein, 10 aa, Artificial Sequence
  Artificially Synthesized Peptide
ATPTGWGLAI

SEQ ID NO: 1459 - protein, 10 aa, Artificial Sequence
  Artificially Synthesized Peptide
CAFSSAGPCA

SEQ ID NO: 1460 - protein, 10 aa, Artificial Sequence
  Artificially Synthesized Peptide
CTCIPIPSSW

SEQ ID NO: 1461 - protein, 10 aa, Artificial Sequence
  Artificially Synthesized Peptide
CTIPAQGTSM

SEQ ID NO: 1462 - protein, 10 aa, Artificial Sequence
  Artificially Synthesized Peptide
DATPTGWGLA

SEQ ID NO: 1463 - protein, 10 aa, Artificial Sequence
  Artificially Synthesized Peptide
DSWWTSLNFL

SEQ ID NO: 1464 - protein, 10 aa, Artificial Sequence
  Artificially Synthesized Peptide
DTASALYREA

SEQ ID NO: 1465 - protein, 10 aa, Artificial Sequence
  Artificially Synthesized Peptide
FAAPFTQCGY

SEQ ID NO: 1466 - protein, 10 aa, Artificial Sequence
  Artificially Synthesized Peptide
FSWLSLLVPF

SEQ ID NO: 1467 - protein, 10 aa, Artificial Sequence
  Artificially Synthesized Peptide
FTFSPTYKAF

SEQ ID NO: 1468 - protein, 10 aa, Artificial Sequence
  Artificially Synthesized Peptide
FTQCGYPALM

SEQ ID NO: 1469 - protein, 10 aa, Artificial Sequence
  Artificially Synthesized Peptide
GSSSGTVNPV

SEQ ID NO: 1470 - protein, 10 aa, Artificial Sequence
  Artificially Synthesized Peptide
GTNLSVPNPL

SEQ ID NO: 1471 - protein, 10 aa, Artificial Sequence
  Artificially Synthesized Peptide
GTSFVYVPSA

SEQ ID NO: 1472 - protein, 10 aa, Artificial Sequence
  Artificially Synthesized Peptide
HTAELLAACF

SEQ ID NO: 1473 - protein, 10 aa, Artificial Sequence
  Artificially Synthesized Peptide
HTLWKAGILY

SEQ ID NO: 1474 - protein, 10 aa, Artificial Sequence
  Artificially Synthesized Peptide
LAFSYMDDVV

SEQ ID NO: 1475 - protein, 10 aa, Artificial Sequence
  Artificially Synthesized Peptide
LSLDVSAAFY

SEQ ID NO: 1476 - protein, 10 aa, Artificial Sequence
  Artificially Synthesized Peptide
LSLLVPFVQW

SEQ ID NO: 1477 - protein, 10 aa, Artificial Sequence
  Artificially Synthesized Peptide
LSLRGLPVCA

SEQ ID NO: 1478 - protein, 10 aa, Artificial Sequence
  Artificially Synthesized Peptide
LSPTVWLSVI

SEQ ID NO: 1479 - protein, 10 aa, Artificial Sequence
  Artificially Synthesized Peptide
LSRKYTSFPW

SEQ ID NO: 1480 - protein, 10 aa, Artificial Sequence
  Artificially Synthesized Peptide
LSSNLSWLSL

SEQ ID NO: 1481 - protein, 10 aa, Artificial Sequence
  Artificially Synthesized Peptide
LSTLPETTVV

SEQ ID NO: 1482 - protein, 10 aa, Artificial Sequence
  Artificially Synthesized Peptide
LSWLSLDVSA

SEQ ID NO: 1483 - protein, 10 aa, Artificial Sequence
  Artificially Synthesized Peptide
LSYQHFRKLL

SEQ ID NO: 1484 - protein, 10 aa, Artificial Sequence
  Artificially Synthesized Peptide
LTIPQSLDSW

SEQ ID NO: 1485 - protein, 10 aa, Artificial Sequence
  Artificially Synthesized Peptide
MSTTDLEAYF

SEQ ID NO: 1486 - protein, 10 aa, Artificial Sequence
  Artificially Synthesized Peptide
PADDPSRGRL

SEQ ID NO: 1487 - protein, 10 aa, Artificial Sequence
  Artificially Synthesized Peptide
PAGGSSSGTV

SEQ ID NO: 1488 - protein, 10 aa, Artificial Sequence
  Artificially Synthesized Peptide
PALMPLYACI

SEQ ID NO: 1489 - protein, 10 aa, Artificial Sequence
  Artificially Synthesized Peptide
PAPCNFFTSA

SEQ ID NO: 1490 - protein, 10 aa, Artificial Sequence
  Artificially Synthesized Peptide
PARVTGGVFL

SEQ ID NO: 1491 - protein, 10 aa, Artificial Sequence
  Artificially Synthesized Peptide
PAYRPPNAPI

SEQ ID NO: 1492 - protein, 10 aa, Artificial Sequence
  Artificially Synthesized Peptide
PTTGRTSLYA

SEQ ID NO: 1493 - protein, 10 aa, Artificial Sequence
  Artificially Synthesized Peptide
PTVQASKLCL

SEQ ID NO: 1494 - protein, 10 aa, Artificial Sequence
  Artificially Synthesized Peptide
PTVWLSVIWM

SEQ ID NO: 1495 - protein, 10 aa, Artificial Sequence
  Artificially Synthesized Peptide
QAGFFLLTRI

SEQ ID NO: 1496 - protein, 10 aa, Artificial Sequence
  Artificially Synthesized Peptide
QAILCWGELM

SEQ ID NO: 1497 - protein, 10 aa, Artificial Sequence
  Artificially Synthesized Peptide
QAMQWNSTTF

SEQ ID NO: 1498 - protein, 10 aa, Artificial Sequence
  Artificially Synthesized Peptide
QASKLCLGWL

SEQ ID NO: 1499 - protein, 10 aa, Artificial Sequence
  Artificially Synthesized Peptide
QSLDSWWTSL

SEQ ID NO: 1500 - protein, 10 aa, Artificial Sequence
  Artificially Synthesized Peptide
RTPARVTGGV

SEQ ID NO: 1501 - protein, 10 aa, Artificial Sequence
  Artificially Synthesized Peptide
SAICSVVRRA

SEQ ID NO: 1502 - protein, 10 aa, Artificial Sequence
  Artificially Synthesized Peptide
SSAGPCALRF

SEQ ID NO: 1503 - protein, 10 aa, Artificial Sequence
  Artificially Synthesized Peptide
TAELLAACFA

SEQ ID NO: 1504 - protein, 10 aa, Artificial Sequence
  Artificially Synthesized Peptide
TALRQAILCW

SEQ ID NO: 1505 - protein, 10 aa, Artificial Sequence
  Artificially Synthesized Peptide
TASALYREAL

SEQ ID NO: 1506 - protein, 10 aa, Artificial Sequence
  Artificially Synthesized Peptide
TSFPWLLGCA

SEQ ID NO: 1507 - protein, 10 aa, Artificial Sequence
  Artificially Synthesized Peptide
TSFVYVPSAL

SEQ ID NO: 1508 - protein, 10 aa, Artificial Sequence
  Artificially Synthesized Peptide
TSGFLGPLLV

SEQ ID NO: 1509 - protein, 10 aa, Artificial Sequence
  Artificially Synthesized Peptide
VAEDLNLGNL

SEQ ID NO: 1510 - protein, 10 aa, Artificial Sequence
  Artificially Synthesized Peptide
YSLNFMGYVI

SEQ ID NO: 1511 - protein, 11 aa, Artificial Sequence
  Artificially Synthesized Peptide
AACFARSRSGA

SEQ ID NO: 1512 - protein, 11 aa, Artificial Sequence
  Artificially Synthesized Peptide
AAPFTQCGYPA

SEQ ID NO: 1513 - protein, 11 aa, Artificial Sequence
  Artificially Synthesized Peptide
ASVRFSWLSLL

SEQ ID NO: 1514 - protein, 11 aa, Artificial Sequence
  Artificially Synthesized Peptide
CAFSSAGPCAL

SEQ ID NO: 1515 - protein, 11 aa, Artificial Sequence
  Artificially Synthesized Peptide
CALRFTSARRM

SEQ ID NO: 1516 - protein, 11 aa, Artificial Sequence
  Artificially Synthesized Peptide
CSPHHTALRQA

SEQ ID NO: 1517 - protein, 11 aa, Artificial Sequence
  Artificially Synthesized Peptide
CTCIPIPSSWA

SEQ ID NO: 1518 - protein, 11 aa, Artificial Sequence
  Artificially Synthesized Peptide
DATPTGWGLAI

SEQ ID NO: 1519 - protein, 11 aa, Artificial Sequence
  Artificially Synthesized Peptide
DTASALYREAL

SEQ ID NO: 1520 - protein, 11 aa, Artificial Sequence
  Artificially Synthesized Peptide
ESRLVVDFSQF

SEQ ID NO: 1521 - protein, 11 aa, Artificial Sequence
  Artificially Synthesized Peptide
FADATPTGWGL

SEQ ID NO: 1522 - protein, 11 aa, Artificial Sequence
  Artificially Synthesized Peptide
FSSAGPCALRF

SEQ ID NO: 1523 - protein, 11 aa, Artificial Sequence
  Artificially Synthesized Peptide
FSWLSLLVPFV

SEQ ID NO: 1524 - protein, 11 aa, Artificial Sequence
  Artificially Synthesized Peptide
FSYMDDVVLGA

SEQ ID NO: 1525 - protein, 11 aa, Artificial Sequence
  Artificially Synthesized Peptide
FTFSPTYKAFL

SEQ ID NO: 1526 - protein, 11 aa, Artificial Sequence
  Artificially Synthesized Peptide
GAHLSLRGLPV

SEQ ID NO: 1527 - protein, 11 aa, Artificial Sequence
  Artificially Synthesized Peptide
GAKSVQHLESL

SEQ ID NO: 1528 - protein, 11 aa, Artificial Sequence
  Artificially Synthesized Peptide
GTSFVYVPSAL

SEQ ID NO: 1529 - protein, 11 aa, Artificial Sequence
  Artificially Synthesized Peptide
HTAELLAACFA

SEQ ID NO: 1530 - protein, 11 aa, Artificial Sequence
  Artificially Synthesized Peptide
HTALRQAILCW

SEQ ID NO: 1531 - protein, 11 aa, Artificial Sequence
  Artificially Synthesized Peptide
ISCLTFGRETV

SEQ ID NO: 1532 - protein, 11 aa, Artificial Sequence
  Artificially Synthesized Peptide
KTKRWGYSLNF

SEQ ID NO: 1533 - protein, 11 aa, Artificial Sequence
  Artificially Synthesized Peptide
LAFSYMDDVVL

SEQ ID NO: 1534 - protein, 11 aa, Artificial Sequence
  Artificially Synthesized Peptide
LAQFTSAICSV

SEQ ID NO: 1535 - protein, 11 aa, Artificial Sequence
  Artificially Synthesized Peptide
LSLLVPFVQWF

SEQ ID NO: 1536 - protein, 11 aa, Artificial Sequence
  Artificially Synthesized Peptide
LSLRGLPVCAF

SEQ ID NO: 1537 - protein, 11 aa, Artificial Sequence
  Artificially Synthesized Peptide
LSPTVWLSVIW

SEQ ID NO: 1538 - protein, 11 aa, Artificial Sequence
  Artificially Synthesized Peptide
LSRKYTSFPWL

SEQ ID NO: 1539 - protein, 11 aa, Artificial Sequence
  Artificially Synthesized Peptide
LSWLSLDVSAA

SEQ ID NO: 1540 - protein, 11 aa, Artificial Sequence
  Artificially Synthesized Peptide
LSYQHFRKLLL

SEQ ID NO: 1541 - protein, 11 aa, Artificial Sequence
  Artificially Synthesized Peptide
LTFGRETVLEY

SEQ ID NO: 1542 - protein, 11 aa, Artificial Sequence
  Artificially Synthesized Peptide
LTIPQSLDSWW

SEQ ID NO: 1543 - protein, 11 aa, Artificial Sequence
  Artificially Synthesized Peptide
LTNLLSSNLSW

SEQ ID NO: 1544 - protein, 11 aa, Artificial Sequence
  Artificially Synthesized Peptide
LTRILTIPQSL

SEQ ID NO: 1545 - protein, 11 aa, Artificial Sequence
  Artificially Synthesized Peptide
PARDVLCLRPV

SEQ ID NO: 1546 - protein, 11 aa, Artificial Sequence
  Artificially Synthesized Peptide
PARVTGGVFLV

SEQ ID NO: 1547 - protein, 11 aa, Artificial Sequence
  Artificially Synthesized Peptide
PAYRPPNAPIL

SEQ ID NO: 1548 - protein, 11 aa, Artificial Sequence
  Artificially Synthesized Peptide
PTVWLSVIWMM

SEQ ID NO: 1549 - protein, 11 aa, Artificial Sequence
  Artificially Synthesized Peptide
QAFTFSPTYKA

SEQ ID NO: 1550 - protein, 11 aa, Artificial Sequence
  Artificially Synthesized Peptide
QAGFFLLTRIL

SEQ ID NO: 1551 - protein, 11 aa, Artificial Sequence
  Artificially Synthesized Peptide
QASKLCLGWLW

SEQ ID NO: 1552 - protein, 11 aa, Artificial Sequence
  Artificially Synthesized Peptide
QSLTNLLSSNL

SEQ ID NO: 1553 - protein, 11 aa, Artificial Sequence
  Artificially Synthesized Peptide
RAFPHCLAFSY

SEQ ID NO: 1554 - protein, 11 aa, Artificial Sequence
  Artificially Synthesized Peptide
RTPARVTGGVF

SEQ ID NO: 1555 - protein, 11 aa, Artificial Sequence
  Artificially Synthesized Peptide
RTPPAYRPPNA

SEQ ID NO: 1556 - protein, 11 aa, Artificial Sequence
  Artificially Synthesized Peptide
SAICSVVRRAF

SEQ ID NO: 1557 - protein, 11 aa, Artificial Sequence
  Artificially Synthesized Peptide
SASFCGSPYSW

SEQ ID NO: 1558 - protein, 11 aa, Artificial Sequence
  Artificially Synthesized Peptide
SSNLSWLSLDV

SEQ ID NO: 1559 - protein, 11 aa, Artificial Sequence
  Artificially Synthesized Peptide
TSAICSVVRRA

SEQ ID NO: 1560 - protein, 11 aa, Artificial Sequence
  Artificially Synthesized Peptide
TSFPWLLGCAA

SEQ ID NO: 1561 - protein, 11 aa, Artificial Sequence
  Artificially Synthesized Peptide
TSGFLGPLLVL

SEQ ID NO: 1562 - protein, 11 aa, Artificial Sequence
  Artificially Synthesized Peptide
VSWPKFAVPNL

SEQ ID NO: 1563 - protein, 11 aa, Artificial Sequence
  Artificially Synthesized Peptide
WTHKVGNFTGL

SEQ ID NO: 1564 - protein, 11 aa, Artificial Sequence
  Artificially Synthesized Peptide
YTSFPWLLGCA

SEQ ID NO: 1565 - protein, 8 aa, Artificial Sequence
  Artificially Synthesized Peptide
AILCWGEL

SEQ ID NO: 1566 - protein, 8 aa, Artificial Sequence
  Artificially Synthesized Peptide
APFTQCGY

SEQ ID NO: 1567 - protein, 8 aa, Artificial Sequence
  Artificially Synthesized Peptide
AVPNLQSL

SEQ ID NO: 1568 - protein, 8 aa, Artificial Sequence
  Artificially Synthesized Peptide
CIPIPSSW

SEQ ID NO: 1569 - protein, 8 aa, Artificial Sequence
  Artificially Synthesized Peptide
CLGWLWGM

SEQ ID NO: 1570 - protein, 8 aa, Artificial Sequence
  Artificially Synthesized Peptide
CLIFLLVL

SEQ ID NO: 1571 - protein, 8 aa, Artificial Sequence
  Artificially Synthesized Peptide
CLRRFIIF

SEQ ID NO: 1572 - protein, 8 aa, Artificial Sequence
  Artificially Synthesized Peptide
CQRIVGLL

SEQ ID NO: 1573 - protein, 8 aa, Artificial Sequence
  Artificially Synthesized Peptide
DIDPYKEF

SEQ ID NO: 1574 - protein, 8 aa, Artificial Sequence
  Artificially Synthesized Peptide
DLLDTASA

SEQ ID NO: 1575 - protein, 8 aa, Artificial Sequence
  Artificially Synthesized Peptide
DPRVRGLY

SEQ ID NO: 1576 - protein, 8 aa, Artificial Sequence
  Artificially Synthesized Peptide
DPYKEFGA

SEQ ID NO: 1577 - protein, 8 aa, Artificial Sequence
  Artificially Synthesized Peptide
DVLCLRPV

SEQ ID NO: 1578 - protein, 8 aa, Artificial Sequence
  Artificially Synthesized Peptide
ELGEEIRL

SEQ ID NO: 1579 - protein, 8 aa, Artificial Sequence
  Artificially Synthesized Peptide
ELLAACFA

SEQ ID NO: 1580 - protein, 8 aa, Artificial Sequence
  Artificially Synthesized Peptide
FIIFLFIL

SEQ ID NO: 1581 - protein, 8 aa, Artificial Sequence
  Artificially Synthesized Peptide
FILLLCLI

SEQ ID NO: 1582 - protein, 8 aa, Artificial Sequence
  Artificially Synthesized Peptide
FLGPLLVL

SEQ ID NO: 1583 - protein, 8 aa, Artificial Sequence
  Artificially Synthesized Peptide
FLLVLLDY

SEQ ID NO: 1584 - protein, 8 aa, Artificial Sequence
  Artificially Synthesized Peptide
FPWLLGCA

SEQ ID NO: 1585 - protein, 8 aa, Artificial Sequence
  Artificially Synthesized Peptide
FVGLSPTV

SEQ ID NO: 1586 - protein, 8 aa, Artificial Sequence
  Artificially Synthesized Peptide
FVQWFVGL

SEQ ID NO: 1587 - protein, 8 aa, Artificial Sequence
  Artificially Synthesized Peptide
FVYVPSAL

SEQ ID NO: 1588 - protein, 8 aa, Artificial Sequence
  Artificially Synthesized Peptide
GLSPFLLA

SEQ ID NO: 1589 - protein, 8 aa, Artificial Sequence
  Artificially Synthesized Peptide
GLSPTVWL

SEQ ID NO: 1590 - protein, 8 aa, Artificial Sequence
  Artificially Synthesized Peptide
GMLPVCPL

SEQ ID NO: 1591 - protein, 8 aa, Artificial Sequence
  Artificially Synthesized Peptide
GPLLVLQA

SEQ ID NO: 1592 - protein, 8 aa, Artificial Sequence
  Artificially Synthesized Peptide
GVGLSPFL

SEQ ID NO: 1593 - protein, 8 aa, Artificial Sequence
  Artificially Synthesized Peptide
HLYSHPII

SEQ ID NO: 1594 - protein, 8 aa, Artificial Sequence
  Artificially Synthesized Peptide
HPAAMPHL

SEQ ID NO: 1595 - protein, 8 aa, Artificial Sequence
  Artificially Synthesized Peptide
IIFLFILL

SEQ ID NO: 1596 - protein, 8 aa, Artificial Sequence
  Artificially Synthesized Peptide
IILGFRKI

SEQ ID NO: 1597 - protein, 8 aa, Artificial Sequence
  Artificially Synthesized Peptide
ILCWGELM

SEQ ID NO: 1598 - protein, 8 aa, Artificial Sequence
  Artificially Synthesized Peptide
ILLLCLIF

SEQ ID NO: 1599 - protein, 8 aa, Artificial Sequence
  Artificially Synthesized Peptide
ILRGTSFV

SEQ ID NO: 1600 - protein, 8 aa, Artificial Sequence
  Artificially Synthesized Peptide
ILTIPQSL

SEQ ID NO: 1601 - protein, 8 aa, Artificial Sequence
  Artificially Synthesized Peptide
IPIPSSWA

SEQ ID NO: 1602 - protein, 8 aa, Artificial Sequence
  Artificially Synthesized Peptide
IPQSLDSW

SEQ ID NO: 1603 - protein, 8 aa, Artificial Sequence
  Artificially Synthesized Peptide
IPSSWAFA

SEQ ID NO: 1604 - protein, 8 aa, Artificial Sequence
  Artificially Synthesized Peptide
IVGLLGFA

SEQ ID NO: 1605 - protein, 8 aa, Artificial Sequence
  Artificially Synthesized Peptide
KIPMGVGL

SEQ ID NO: 1606 - protein, 8 aa, Artificial Sequence
  Artificially Synthesized Peptide
KLCLGWLW

SEQ ID NO: 1607 - protein, 8 aa, Artificial Sequence
  Artificially Synthesized Peptide
KLIMPARF

SEQ ID NO: 1608 - protein, 8 aa, Artificial Sequence
  Artificially Synthesized Peptide
KLPVNRPI

SEQ ID NO: 1609 - protein, 8 aa, Artificial Sequence
  Artificially Synthesized Peptide
KVGNFTGL

SEQ ID NO: 1610 - protein, 8 aa, Artificial Sequence
  Artificially Synthesized Peptide
KVLHKRTL

SEQ ID NO: 1611 - protein, 8 aa, Artificial Sequence
  Artificially Synthesized Peptide
LIFLLVLL

SEQ ID NO: 1612 - protein, 8 aa, Artificial Sequence
  Artificially Synthesized Peptide
LIMPARFY

SEQ ID NO: 1613 - protein, 8 aa, Artificial Sequence
  Artificially Synthesized Peptide
LLAQFTSA

SEQ ID NO: 1614 - protein, 8 aa, Artificial Sequence
  Artificially Synthesized Peptide
LLCLIFLL

SEQ ID NO: 1615 - protein, 8 aa, Artificial Sequence
  Artificially Synthesized Peptide
LLDTASAL

SEQ ID NO: 1616 - protein, 8 aa, Artificial Sequence
  Artificially Synthesized Peptide
LLDYQGML

SEQ ID NO: 1617 - protein, 8 aa, Artificial Sequence
  Artificially Synthesized Peptide
LLGCAANW

SEQ ID NO: 1618 - protein, 8 aa, Artificial Sequence
  Artificially Synthesized Peptide
LLGFAAPF

SEQ ID NO: 1619 - protein, 8 aa, Artificial Sequence
  Artificially Synthesized Peptide
LLGWSPQA

SEQ ID NO: 1620 - protein, 8 aa, Artificial Sequence
  Artificially Synthesized Peptide
LLLCLIFL

SEQ ID NO: 1621 - protein, 8 aa, Artificial Sequence
  Artificially Synthesized Peptide
LLPIFFCL

SEQ ID NO: 1622 - protein, 8 aa, Artificial Sequence
  Artificially Synthesized Peptide
LLSLGIHL

SEQ ID NO: 1623 - protein, 8 aa, Artificial Sequence
  Artificially Synthesized Peptide
LLSSNLSW

SEQ ID NO: 1624 - protein, 8 aa, Artificial Sequence
  Artificially Synthesized Peptide
LLTRILTI

SEQ ID NO: 1625 - protein, 8 aa, Artificial Sequence
  Artificially Synthesized Peptide
LLVGSSGL

SEQ ID NO: 1626 - protein, 8 aa, Artificial Sequence
  Artificially Synthesized Peptide
LLVLQAGF

SEQ ID NO: 1627 - protein, 8 aa, Artificial Sequence
  Artificially Synthesized Peptide
LLVPFVQW

SEQ ID NO: 1628 - protein, 8 aa, Artificial Sequence
  Artificially Synthesized Peptide
LMPLYACI

SEQ ID NO: 1629 - protein, 8 aa, Artificial Sequence
  Artificially Synthesized Peptide
LPIFFCLW

SEQ ID NO: 1630 - protein, 8 aa, Artificial Sequence
  Artificially Synthesized Peptide
LPIHTAEL

SEQ ID NO: 1631 - protein, 8 aa, Artificial Sequence
  Artificially Synthesized Peptide
LQAGFFLL

SEQ ID NO: 1632 - protein, 8 aa, Artificial Sequence
  Artificially Synthesized Peptide
LQSLTNLL

SEQ ID NO: 1633 - protein, 8 aa, Artificial Sequence
  Artificially Synthesized Peptide
LVLQAGFF

SEQ ID NO: 1634 - protein, 8 aa, Artificial Sequence
  Artificially Synthesized Peptide
LVPFVQWF

SEQ ID NO: 1635 - protein, 8 aa, Artificial Sequence
  Artificially Synthesized Peptide
LVSFGVWI

SEQ ID NO: 1636 - protein, 8 aa, Artificial Sequence
  Artificially Synthesized Peptide
LVVDFSQF

SEQ ID NO: 1637 - protein, 8 aa, Artificial Sequence
  Artificially Synthesized Peptide
MPLSYQHF

SEQ ID NO: 1638 - protein, 8 aa, Artificial Sequence
  Artificially Synthesized Peptide
MQLFHLCL

SEQ ID NO: 1639 - protein, 8 aa, Artificial Sequence
  Artificially Synthesized Peptide
MQWNSTTF

SEQ ID NO: 1640 - protein, 8 aa, Artificial Sequence
  Artificially Synthesized Peptide
NLNVSIPW

SEQ ID NO: 1641 - protein, 8 aa, Artificial Sequence
  Artificially Synthesized Peptide
NLQSLTNL

SEQ ID NO: 1642 - protein, 8 aa, Artificial Sequence
  Artificially Synthesized Peptide
NLSVPNPL

SEQ ID NO: 1643 - protein, 8 aa, Artificial Sequence
  Artificially Synthesized Peptide
NPNKTKRW

SEQ ID NO: 1644 - protein, 8 aa, Artificial Sequence
  Artificially Synthesized Peptide
PIFFCLWV

SEQ ID NO: 1645 - protein, 8 aa, Artificial Sequence
  Artificially Synthesized Peptide
PIHTAELL

SEQ ID NO: 1646 - protein, 8 aa, Artificial Sequence
  Artificially Synthesized Peptide
PIPSSWAF

SEQ ID NO: 1647 - protein, 8 aa, Artificial Sequence
  Artificially Synthesized Peptide
PQSLDSWW

SEQ ID NO: 1648 - protein, 8 aa, Artificial Sequence
  Artificially Synthesized Peptide
PVCAFSSA

SEQ ID NO: 1649 - protein, 8 aa, Artificial Sequence
  Artificially Synthesized Peptide
PVNRPIDW

SEQ ID NO: 1650 - protein, 8 aa, Artificial Sequence
  Artificially Synthesized Peptide
QLDPARDV

SEQ ID NO: 1651 - protein, 8 aa, Artificial Sequence
  Artificially Synthesized Peptide
RIVGLLGF

SEQ ID NO: 1652 - protein, 8 aa, Artificial Sequence
  Artificially Synthesized Peptide
RLKLIMPA

SEQ ID NO: 1653 - protein, 8 aa, Artificial Sequence
  Artificially Synthesized Peptide
RPPNAPIL

SEQ ID NO: 1654 - protein, 8 aa, Artificial Sequence
  Artificially Synthesized Peptide
RQLLWFHI

SEQ ID NO: 1655 - protein, 8 aa, Artificial Sequence
  Artificially Synthesized Peptide
RVAEDLNL

SEQ ID NO: 1656 - protein, 8 aa, Artificial Sequence
  Artificially Synthesized Peptide
RVHFASPL

SEQ ID NO: 1657 - protein, 8 aa, Artificial Sequence
  Artificially Synthesized Peptide
RVTGGVFL

SEQ ID NO: 1658 - protein, 8 aa, Artificial Sequence
  Artificially Synthesized Peptide
SIPWTHKV

SEQ ID NO: 1659 - protein, 8 aa, Artificial Sequence
  Artificially Synthesized Peptide
SLDVSAAF

SEQ ID NO: 1660 - protein, 8 aa, Artificial Sequence
  Artificially Synthesized Peptide
SLNFMGYV

SEQ ID NO: 1661 - protein, 8 aa, Artificial Sequence
  Artificially Synthesized Peptide
SPFLLAQF

SEQ ID NO: 1662 - protein, 8 aa, Artificial Sequence
  Artificially Synthesized Peptide
SPQAQGIL

SEQ ID NO: 1663 - protein, 8 aa, Artificial Sequence
  Artificially Synthesized Peptide
SPSVPSHL

SEQ ID NO: 1664 - protein, 8 aa, Artificial Sequence
  Artificially Synthesized Peptide
SPTVWLSV

SEQ ID NO: 1665 - protein, 8 aa, Artificial Sequence
  Artificially Synthesized Peptide
SPTYKAFL

SEQ ID NO: 1666 - protein, 8 aa, Artificial Sequence
  Artificially Synthesized Peptide
SVPNPLGF

SEQ ID NO: 1667 - protein, 8 aa, Artificial Sequence
  Artificially Synthesized Peptide
SVQHLESL

SEQ ID NO: 1668 - protein, 8 aa, Artificial Sequence
  Artificially Synthesized Peptide
SVVLSRKY

SEQ ID NO: 1669 - protein, 8 aa, Artificial Sequence
  Artificially Synthesized Peptide
TLPETTVV

SEQ ID NO: 1670 - protein, 8 aa, Artificial Sequence
  Artificially Synthesized Peptide
TLWKAGIL

SEQ ID NO: 1671 - protein, 8 aa, Artificial Sequence
  Artificially Synthesized Peptide
TPPHGGLL

SEQ ID NO: 1672 - protein, 8 aa, Artificial Sequence
  Artificially Synthesized Peptide
TPTGWGLA

SEQ ID NO: 1673 - protein, 8 aa, Artificial Sequence
  Artificially Synthesized Peptide
TQCGYPAL

SEQ ID NO: 1674 - protein, 8 aa, Artificial Sequence
  Artificially Synthesized Peptide
TVNEKRRL

SEQ ID NO: 1675 - protein, 8 aa, Artificial Sequence
  Artificially Synthesized Peptide
TVWLSVIW

SEQ ID NO: 1676 - protein, 8 aa, Artificial Sequence
  Artificially Synthesized Peptide
VLLDYQGM

SEQ ID NO: 1677 - protein, 8 aa, Artificial Sequence
  Artificially Synthesized Peptide
VLQAGFFL

SEQ ID NO: 1678 - protein, 8 aa, Artificial Sequence
  Artificially Synthesized Peptide
VPFVQWFV

SEQ ID NO: 1679 - protein, 8 aa, Artificial Sequence
  Artificially Synthesized Peptide
VPSALNPA

SEQ ID NO: 1680 - protein, 8 aa, Artificial Sequence
  Artificially Synthesized Peptide
VQASKLCL

SEQ ID NO: 1681 - protein, 8 aa, Artificial Sequence
  Artificially Synthesized Peptide
VVLGAKSV

SEQ ID NO: 1682 - protein, 8 aa, Artificial Sequence
  Artificially Synthesized Peptide
WILRGTSF

SEQ ID NO: 1683 - protein, 8 aa, Artificial Sequence
  Artificially Synthesized Peptide
WIRTPPAY

SEQ ID NO: 1684 - protein, 8 aa, Artificial Sequence
  Artificially Synthesized Peptide
WLSLDVSA

SEQ ID NO: 1685 - protein, 8 aa, Artificial Sequence
  Artificially Synthesized Peptide
WLSLLVPF

SEQ ID NO: 1686 - protein, 8 aa, Artificial Sequence
  Artificially Synthesized Peptide
WMCLRRFI

SEQ ID NO: 1687 - protein, 8 aa, Artificial Sequence
  Artificially Synthesized Peptide
YLHTLWKA

SEQ ID NO: 1688 - protein, 8 aa, Artificial Sequence
  Artificially Synthesized Peptide
YLPLDKGI

SEQ ID NO: 1689 - protein, 8 aa, Artificial Sequence
  Artificially Synthesized Peptide
YLVSFGVW

SEQ ID NO: 1690 - protein, 8 aa, Artificial Sequence
  Artificially Synthesized Peptide
YPALMPLY

SEQ ID NO: 1691 - protein, 8 aa, Artificial Sequence
  Artificially Synthesized Peptide
YQHFRKLL

SEQ ID NO: 1692 - protein, 9 aa, Artificial Sequence
  Artificially Synthesized Peptide
AICSVVRRA

SEQ ID NO: 1693 - protein, 9 aa, Artificial Sequence
  Artificially Synthesized Peptide
AILCWGELM

SEQ ID NO: 1694 - protein, 9 aa, Artificial Sequence
  Artificially Synthesized Peptide
ALMPLYACI

SEQ ID NO: 1695 - protein, 9 aa, Artificial Sequence
  Artificially Synthesized Peptide
ALRQAILCW

SEQ ID NO: 1696 - protein, 9 aa, Artificial Sequence
  Artificially Synthesized Peptide
AMQWNSTTF

SEQ ID NO: 1697 - protein, 9 aa, Artificial Sequence
  Artificially Synthesized Peptide
AMSTTDLEA

SEQ ID NO: 1698 - protein, 9 aa, Artificial Sequence
  Artificially Synthesized Peptide
APCNFFTSA

SEQ ID NO: 1699 - protein, 9 aa, Artificial Sequence
  Artificially Synthesized Peptide
CIPIPSSWA

SEQ ID NO: 1700 - protein, 9 aa, Artificial Sequence
  Artificially Synthesized Peptide
CLIFLLVLL

SEQ ID NO: 1701 - protein, 9 aa, Artificial Sequence
  Artificially Synthesized Peptide
CLRRFIIFL

SEQ ID NO: 1702 - protein, 9 aa, Artificial Sequence
  Artificially Synthesized Peptide
CLTFGRETV

SEQ ID NO: 1703 - protein, 9 aa, Artificial Sequence
  Artificially Synthesized Peptide
CPGYRWMCL

SEQ ID NO: 1704 - protein, 9 aa, Artificial Sequence
  Artificially Synthesized Peptide
CPTVQASKL

SEQ ID NO: 1705 - protein, 9 aa, Artificial Sequence
  Artificially Synthesized Peptide
CQLDPARDV

SEQ ID NO: 1706 - protein, 9 aa, Artificial Sequence
  Artificially Synthesized Peptide
DLLDTASAL

SEQ ID NO: 1707 - protein, 9 aa, Artificial Sequence
  Artificially Synthesized Peptide
DLNLGNLNV

SEQ ID NO: 1708 - protein, 9 aa, Artificial Sequence
  Artificially Synthesized Peptide
DPARDVLCL

SEQ ID NO: 1709 - protein, 9 aa, Artificial Sequence
  Artificially Synthesized Peptide
DPSRGRLGL

SEQ ID NO: 1710 - protein, 9 aa, Artificial Sequence
  Artificially Synthesized Peptide
DVVLGAKSV

SEQ ID NO: 1711 - protein, 9 aa, Artificial Sequence
  Artificially Synthesized Peptide
FIIFLFILL

SEQ ID NO: 1712 - protein, 9 aa, Artificial Sequence
  Artificially Synthesized Peptide
FILLLCLIF

SEQ ID NO: 1713 - protein, 9 aa, Artificial Sequence
  Artificially Synthesized Peptide
FLFILLLCL

SEQ ID NO: 1714 - protein, 9 aa, Artificial Sequence
  Artificially Synthesized Peptide
FLLAQFTSA

SEQ ID NO: 1715 - protein, 9 aa, Artificial Sequence
  Artificially Synthesized Peptide
FLLSLGIHL

SEQ ID NO: 1716 - protein, 9 aa, Artificial Sequence
  Artificially Synthesized Peptide
FLLTRILTI

SEQ ID NO: 1717 - protein, 9 aa, Artificial Sequence
  Artificially Synthesized Peptide
FPDHQLDPA

SEQ ID NO: 1718 - protein, 9 aa, Artificial Sequence
  Artificially Synthesized Peptide
FPHCLAFSY

SEQ ID NO: 1719 - protein, 9 aa, Artificial Sequence
  Artificially Synthesized Peptide
FPWLLGCAA

SEQ ID NO: 1720 - protein, 9 aa, Artificial Sequence
  Artificially Synthesized Peptide
FVGLSPTVW

SEQ ID NO: 1721 - protein, 9 aa, Artificial Sequence
  Artificially Synthesized Peptide
GLCQVFADA

SEQ ID NO: 1722 - protein, 9 aa, Artificial Sequence
  Artificially Synthesized Peptide
GLLGFAAPF

SEQ ID NO: 1723 - protein, 9 aa, Artificial Sequence
  Artificially Synthesized Peptide
GLLGWSPQA

SEQ ID NO: 1724 - protein, 9 aa, Artificial Sequence
  Artificially Synthesized Peptide
GVGLSPFLL

SEQ ID NO: 1725 - protein, 9 aa, Artificial Sequence
  Artificially Synthesized Peptide
GVWIRTPPA

SEQ ID NO: 1726 - protein, 9 aa, Artificial Sequence
  Artificially Synthesized Peptide
HLLVGSSGL

SEQ ID NO: 1727 - protein, 9 aa, Artificial Sequence
  Artificially Synthesized Peptide
HLSLRGLPV

SEQ ID NO: 1728 - protein, 9 aa, Artificial Sequence
  Artificially Synthesized Peptide
HLYSHPIIL

SEQ ID NO: 1729 - protein, 9 aa, Artificial Sequence
  Artificially Synthesized Peptide
HPAAMPHLL

SEQ ID NO: 1730 - protein, 9 aa, Artificial Sequence
  Artificially Synthesized Peptide
IIFLFILLL

SEQ ID NO: 1731 - protein, 9 aa, Artificial Sequence
  Artificially Synthesized Peptide
ILGFRKIPM

SEQ ID NO: 1732 - protein, 9 aa, Artificial Sequence
  Artificially Synthesized Peptide
ILLLCLIFL

SEQ ID NO: 1733 - protein, 9 aa, Artificial Sequence
  Artificially Synthesized Peptide
ILRGTSFVY

SEQ ID NO: 1734 - protein, 9 aa, Artificial Sequence
  Artificially Synthesized Peptide
IPIPSSWAF

SEQ ID NO: 1735 - protein, 9 aa, Artificial Sequence
  Artificially Synthesized Peptide
IPQSLDSWW

SEQ ID NO: 1736 - protein, 9 aa, Artificial Sequence
  Artificially Synthesized Peptide
IVGLLGFAA

SEQ ID NO: 1737 - protein, 9 aa, Artificial Sequence
  Artificially Synthesized Peptide
KLHLYSHPI

SEQ ID NO: 1738 - protein, 9 aa, Artificial Sequence
  Artificially Synthesized Peptide
KLIMPARFY

SEQ ID NO: 1739 - protein, 9 aa, Artificial Sequence
  Artificially Synthesized Peptide
KVCQRIVGL

SEQ ID NO: 1740 - protein, 9 aa, Artificial Sequence
  Artificially Synthesized Peptide
KVGNFTGLY

SEQ ID NO: 1741 - protein, 9 aa, Artificial Sequence
  Artificially Synthesized Peptide
LLAQFTSAI

SEQ ID NO: 1742 - protein, 9 aa, Artificial Sequence
  Artificially Synthesized Peptide
LLCLIFLLV

SEQ ID NO: 1743 - protein, 9 aa, Artificial Sequence
  Artificially Synthesized Peptide
LLDTASALY

SEQ ID NO: 1744 - protein, 9 aa, Artificial Sequence
  Artificially Synthesized Peptide
LLGCAANWI

SEQ ID NO: 1745 - protein, 9 aa, Artificial Sequence
  Artificially Synthesized Peptide
LLLCLIFLL

SEQ ID NO: 1746 - protein, 9 aa, Artificial Sequence
  Artificially Synthesized Peptide
LLPIFFCLW

SEQ ID NO: 1747 - protein, 9 aa, Artificial Sequence
  Artificially Synthesized Peptide
LLSFLPSDF

SEQ ID NO: 1748 - protein, 9 aa, Artificial Sequence
  Artificially Synthesized Peptide
LLSSNLSWL

SEQ ID NO: 1749 - protein, 9 aa, Artificial Sequence
  Artificially Synthesized Peptide
LLVLQAGFF

SEQ ID NO: 1750 - protein, 9 aa, Artificial Sequence
  Artificially Synthesized Peptide
LLVPFVQWF

SEQ ID NO: 1751 - protein, 9 aa, Artificial Sequence
  Artificially Synthesized Peptide
LLWFHISCL

SEQ ID NO: 1752 - protein, 9 aa, Artificial Sequence
  Artificially Synthesized Peptide
LPIFFCLWV

SEQ ID NO: 1753 - protein, 9 aa, Artificial Sequence
  Artificially Synthesized Peptide
LPIHTAELL

SEQ ID NO: 1754 - protein, 9 aa, Artificial Sequence
  Artificially Synthesized Peptide
LPVCAFSSA

SEQ ID NO: 1755 - protein, 9 aa, Artificial Sequence
  Artificially Synthesized Peptide
LPVNRPIDW

SEQ ID NO: 1756 - protein, 9 aa, Artificial Sequence
  Artificially Synthesized Peptide
LVLLDYQGM

SEQ ID NO: 1757 - protein, 9 aa, Artificial Sequence
  Artificially Synthesized Peptide
LVLQAGFFL

SEQ ID NO: 1758 - protein, 9 aa, Artificial Sequence
  Artificially Synthesized Peptide
LVPFVQWFV

SEQ ID NO: 1759 - protein, 9 aa, Artificial Sequence
  Artificially Synthesized Peptide
MMWYWGPSL

SEQ ID NO: 1760 - protein, 9 aa, Artificial Sequence
  Artificially Synthesized Peptide
NLGNLNVSI

SEQ ID NO: 1761 - protein, 9 aa, Artificial Sequence
  Artificially Synthesized Peptide
NLLSSNLSW

SEQ ID NO: 1762 - protein, 9 aa, Artificial Sequence
  Artificially Synthesized Peptide
NLQSLTNLL

SEQ ID NO: 1763 - protein, 9 aa, Artificial Sequence
  Artificially Synthesized Peptide
NLSWLSLDV

SEQ ID NO: 1764 - protein, 9 aa, Artificial Sequence
  Artificially Synthesized Peptide
PIFFCLWVY

SEQ ID NO: 1765 - protein, 9 aa, Artificial Sequence
  Artificially Synthesized Peptide
PIHTAELLA

SEQ ID NO: 1766 - protein, 9 aa, Artificial Sequence
  Artificially Synthesized Peptide
PIILGFRKI

SEQ ID NO: 1767 - protein, 9 aa, Artificial Sequence
  Artificially Synthesized Peptide
PIPSSWAFA

SEQ ID NO: 1768 - protein, 9 aa, Artificial Sequence
  Artificially Synthesized Peptide
PLDKGIKPY

SEQ ID NO: 1769 - protein, 9 aa, Artificial Sequence
  Artificially Synthesized Peptide
PLEEELPRL

SEQ ID NO: 1770 - protein, 9 aa, Artificial Sequence
  Artificially Synthesized Peptide
PLLPIFFCL

SEQ ID NO: 1771 - protein, 9 aa, Artificial Sequence
  Artificially Synthesized Peptide
PLLVLQAGF

SEQ ID NO: 1772 - protein, 9 aa, Artificial Sequence
  Artificially Synthesized Peptide
PLPIHTAEL

SEQ ID NO: 1773 - protein, 9 aa, Artificial Sequence
  Artificially Synthesized Peptide
PMGVGLSPF

SEQ ID NO: 1774 - protein, 9 aa, Artificial Sequence
  Artificially Synthesized Peptide
PPAYRPPNA

SEQ ID NO: 1775 - protein, 9 aa, Artificial Sequence
  Artificially Synthesized Peptide
PPHGGLLGW

SEQ ID NO: 1776 - protein, 9 aa, Artificial Sequence
  Artificially Synthesized Peptide
QLDPARDVL

SEQ ID NO: 1777 - protein, 9 aa, Artificial Sequence
  Artificially Synthesized Peptide
RILTIPQSL

SEQ ID NO: 1778 - protein, 9 aa, Artificial Sequence
  Artificially Synthesized Peptide
RIVGLLGFA

SEQ ID NO: 1779 - protein, 9 aa, Artificial Sequence
  Artificially Synthesized Peptide
RLVVDFSQF

SEQ ID NO: 1780 - protein, 9 aa, Artificial Sequence
  Artificially Synthesized Peptide
RVTGGVFLV

SEQ ID NO: 1781 - protein, 9 aa, Artificial Sequence
  Artificially Synthesized Peptide
SLDSWWTSL

SEQ ID NO: 1782 - protein, 9 aa, Artificial Sequence
  Artificially Synthesized Peptide
SLDVSAAFY

SEQ ID NO: 1783 - protein, 9 aa, Artificial Sequence
  Artificially Synthesized Peptide
SLLVPFVQW

SEQ ID NO: 1784 - protein, 9 aa, Artificial Sequence
  Artificially Synthesized Peptide
SLNFMGYVI

SEQ ID NO: 1785 - protein, 9 aa, Artificial Sequence
  Artificially Synthesized Peptide
SLRGLPVCA

SEQ ID NO: 1786 - protein, 9 aa, Artificial Sequence
  Artificially Synthesized Peptide
SPTVWLSVI

SEQ ID NO: 1787 - protein, 9 aa, Artificial Sequence
  Artificially Synthesized Peptide
SVRFSWLSL

SEQ ID NO: 1788 - protein, 9 aa, Artificial Sequence
  Artificially Synthesized Peptide
TIPQSLDSW

SEQ ID NO: 1789 - protein, 9 aa, Artificial Sequence
  Artificially Synthesized Peptide
TLWKAGILY

SEQ ID NO: 1790 - protein, 9 aa, Artificial Sequence
  Artificially Synthesized Peptide
TPARVTGGV

SEQ ID NO: 1791 - protein, 9 aa, Artificial Sequence
  Artificially Synthesized Peptide
TPTGWGLAI

SEQ ID NO: 1792 - protein, 9 aa, Artificial Sequence
  Artificially Synthesized Peptide
TQCGYPALM

SEQ ID NO: 1793 - protein, 9 aa, Artificial Sequence
  Artificially Synthesized Peptide
TVQASKLCL

SEQ ID NO: 1794 - protein, 9 aa, Artificial Sequence
  Artificially Synthesized Peptide
TVWLSVIWM

SEQ ID NO: 1795 - protein, 9 aa, Artificial Sequence
  Artificially Synthesized Peptide
VLCLRPVGA

SEQ ID NO: 1796 - protein, 9 aa, Artificial Sequence
  Artificially Synthesized Peptide
VLGGCRHKL

SEQ ID NO: 1797 - protein, 9 aa, Artificial Sequence
  Artificially Synthesized Peptide
VLHKRTLGL

SEQ ID NO: 1798 - protein, 9 aa, Artificial Sequence
  Artificially Synthesized Peptide
VLLDYQGML

SEQ ID NO: 1799 - protein, 9 aa, Artificial Sequence
  Artificially Synthesized Peptide
VLQAGFFLL

SEQ ID NO: 1800 - protein, 9 aa, Artificial Sequence
  Artificially Synthesized Peptide
VLSRKYTSF

SEQ ID NO: 1801 - protein, 9 aa, Artificial Sequence
  Artificially Synthesized Peptide
WILRGTSFV

SEQ ID NO: 1802 - protein, 9 aa, Artificial Sequence
  Artificially Synthesized Peptide
WLLGCAANW

SEQ ID NO: 1803 - protein, 9 aa, Artificial Sequence
  Artificially Synthesized Peptide
WLSLDVSAA

SEQ ID NO: 1804 - protein, 9 aa, Artificial Sequence
  Artificially Synthesized Peptide
WLSLLVPFV

SEQ ID NO: 1805 - protein, 9 aa, Artificial Sequence
  Artificially Synthesized Peptide
WMCLRRFII

SEQ ID NO: 1806 - protein, 9 aa, Artificial Sequence
  Artificially Synthesized Peptide
WPKFAVPNL

SEQ ID NO: 1807 - protein, 9 aa, Artificial Sequence
  Artificially Synthesized Peptide
YLVSFGVWI

SEQ ID NO: 1808 - protein, 9 aa, Artificial Sequence
  Artificially Synthesized Peptide
YMDDVVLGA

SEQ ID NO: 1809 - protein, 9 aa, Artificial Sequence
  Artificially Synthesized Peptide
YPALMPLYA

SEQ ID NO: 1810 - protein, 9 aa, Artificial Sequence
  Artificially Synthesized Peptide
YQHFRKLLL

SEQ ID NO: 1811 - protein, 9 aa, Artificial Sequence
  Artificially Synthesized Peptide
YVPSALNPA

SEQ ID NO: 1812 - protein, 10 aa, Artificial Sequence
  Artificially Synthesized Peptide
AICSVVRRAF

SEQ ID NO: 1813 - protein, 10 aa, Artificial Sequence
  Artificially Synthesized Peptide
APFTQCGYPA

SEQ ID NO: 1814 - protein, 10 aa, Artificial Sequence
  Artificially Synthesized Peptide
AQFTSAICSV

SEQ ID NO: 1815 - protein, 10 aa, Artificial Sequence
  Artificially Synthesized Peptide
CIPIPSSWAF

SEQ ID NO: 1816 - protein, 10 aa, Artificial Sequence
  Artificially Synthesized Peptide
CLAFSYMDDV

SEQ ID NO: 1817 - protein, 10 aa, Artificial Sequence
  Artificially Synthesized Peptide
CLGWLWGMDI

SEQ ID NO: 1818 - protein, 10 aa, Artificial Sequence
  Artificially Synthesized Peptide
CLRRFIIFLF

SEQ ID NO: 1819 - protein, 10 aa, Artificial Sequence
  Artificially Synthesized Peptide
CQLDPARDVL

SEQ ID NO: 1820 - protein, 10 aa, Artificial Sequence
  Artificially Synthesized Peptide
CQRIVGLLGF

SEQ ID NO: 1821 - protein, 10 aa, Artificial Sequence
  Artificially Synthesized Peptide
DIDPYKEFGA

SEQ ID NO: 1822 - protein, 10 aa, Artificial Sequence
  Artificially Synthesized Peptide
DLLDTASALY

SEQ ID NO: 1823 - protein, 10 aa, Artificial Sequence
  Artificially Synthesized Peptide
DVLCLRPVGA

SEQ ID NO: 1824 - protein, 10 aa, Artificial Sequence
  Artificially Synthesized Peptide
ELLSFLPSDF

SEQ ID NO: 1825 - protein, 10 aa, Artificial Sequence
  Artificially Synthesized Peptide
FIIFLFILLL

SEQ ID NO: 1826 - protein, 10 aa, Artificial Sequence
  Artificially Synthesized Peptide
FILLLCLIFL

SEQ ID NO: 1827 - protein, 10 aa, Artificial Sequence
  Artificially Synthesized Peptide
FLFILLLCLI

SEQ ID NO: 1828 - protein, 10 aa, Artificial Sequence
  Artificially Synthesized Peptide
FLGPLLVLQA

SEQ ID NO: 1829 - protein, 10 aa, Artificial Sequence
  Artificially Synthesized Peptide
FLLAQFTSAI

SEQ ID NO: 1830 - protein, 10 aa, Artificial Sequence
  Artificially Synthesized Peptide
FPDHQLDPAF

SEQ ID NO: 1831 - protein, 10 aa, Artificial Sequence
  Artificially Synthesized Peptide
FPHCLAFSYM

SEQ ID NO: 1832 - protein, 10 aa, Artificial Sequence
  Artificially Synthesized Peptide
FVGLSPTVWL

SEQ ID NO: 1833 - protein, 10 aa, Artificial Sequence
  Artificially Synthesized Peptide
FVLGGCRHKL

SEQ ID NO: 1834 - protein, 10 aa, Artificial Sequence
  Artificially Synthesized Peptide
GLPVCAFSSA

SEQ ID NO: 1835 - protein, 10 aa, Artificial Sequence
  Artificially Synthesized Peptide
GLSPFLLAQF

SEQ ID NO: 1836 - protein, 10 aa, Artificial Sequence
  Artificially Synthesized Peptide
GLSPTVWLSV

SEQ ID NO: 1837 - protein, 10 aa, Artificial Sequence
  Artificially Synthesized Peptide
GMDIDPYKEF

SEQ ID NO: 1838 - protein, 10 aa, Artificial Sequence
  Artificially Synthesized Peptide
GPCALRFTSA

SEQ ID NO: 1839 - protein, 10 aa, Artificial Sequence
  Artificially Synthesized Peptide
GPLEEELPRL

SEQ ID NO: 1840 - protein, 10 aa, Artificial Sequence
  Artificially Synthesized Peptide
GPLLVLQAGF

SEQ ID NO: 1841 - protein, 10 aa, Artificial Sequence
  Artificially Synthesized Peptide
GVGLSPFLLA

SEQ ID NO: 1842 - protein, 10 aa, Artificial Sequence
  Artificially Synthesized Peptide
GVWIRTPPAY

SEQ ID NO: 1843 - protein, 10 aa, Artificial Sequence
  Artificially Synthesized Peptide
HLNPNKTKRW

SEQ ID NO: 1844 - protein, 10 aa, Artificial Sequence
  Artificially Synthesized Peptide
HPAAMPHLLV

SEQ ID NO: 1845 - protein, 10 aa, Artificial Sequence
  Artificially Synthesized Peptide
HPIILGFRKI

SEQ ID NO: 1846 - protein, 10 aa, Artificial Sequence
  Artificially Synthesized Peptide
IILGFRKIPM

SEQ ID NO: 1847 - protein, 10 aa, Artificial Sequence
  Artificially Synthesized Peptide
ILLLCLIFLL

SEQ ID NO: 1848 - protein, 10 aa, Artificial Sequence
  Artificially Synthesized Peptide
ILRGTSFVYV

SEQ ID NO: 1849 - protein, 10 aa, Artificial Sequence
  Artificially Synthesized Peptide
ILSTLPETTV

SEQ ID NO: 1850 - protein, 10 aa, Artificial Sequence
  Artificially Synthesized Peptide
IPIPSSWAFA

SEQ ID NO: 1851 - protein, 10 aa, Artificial Sequence
  Artificially Synthesized Peptide
IPMGVGLSPF

SEQ ID NO: 1852 - protein, 10 aa, Artificial Sequence
  Artificially Synthesized Peptide
IPWTHKVGNF

SEQ ID NO: 1853 - protein, 10 aa, Artificial Sequence
  Artificially Synthesized Peptide
KLCLGWLWGM

SEQ ID NO: 1854 - protein, 10 aa, Artificial Sequence
  Artificially Synthesized Peptide
KLHLYSHPII

SEQ ID NO: 1855 - protein, 10 aa, Artificial Sequence
  Artificially Synthesized Peptide
KLPVNRPIDW

SEQ ID NO: 1856 - protein, 10 aa, Artificial Sequence
  Artificially Synthesized Peptide
KQAFTFSPTY

SEQ ID NO: 1857 - protein, 10 aa, Artificial Sequence
  Artificially Synthesized Peptide
KVCQRIVGLL

SEQ ID NO: 1858 - protein, 10 aa, Artificial Sequence
  Artificially Synthesized Peptide
KVLHKRTLGL

SEQ ID NO: 1859 - protein, 10 aa, Artificial Sequence
  Artificially Synthesized Peptide
LIFLLVLLDY

SEQ ID NO: 1860 - protein, 10 aa, Artificial Sequence
  Artificially Synthesized Peptide
LLCLIFLLVL

SEQ ID NO: 1861 - protein, 10 aa, Artificial Sequence
  Artificially Synthesized Peptide
LLDYQGMLPV

SEQ ID NO: 1862 - protein, 10 aa, Artificial Sequence
  Artificially Synthesized Peptide
LLGCAANWIL

SEQ ID NO: 1863 - protein, 10 aa, Artificial Sequence
  Artificially Synthesized Peptide
LLLCLIFLLV

SEQ ID NO: 1864 - protein, 10 aa, Artificial Sequence
  Artificially Synthesized Peptide
LLPIFFCLWV

SEQ ID NO: 1865 - protein, 10 aa, Artificial Sequence
  Artificially Synthesized Peptide
LLSFLPSDFF

SEQ ID NO: 1866 - protein, 10 aa, Artificial Sequence
  Artificially Synthesized Peptide
LLVLLDYQGM

SEQ ID NO: 1867 - protein, 10 aa, Artificial Sequence
  Artificially Synthesized Peptide
LLVLQAGFFL

SEQ ID NO: 1868 - protein, 10 aa, Artificial Sequence
  Artificially Synthesized Peptide
LLVPFVQWFV

SEQ ID NO: 1869 - protein, 10 aa, Artificial Sequence
  Artificially Synthesized Peptide
LPIFFCLWVY

SEQ ID NO: 1870 - protein, 10 aa, Artificial Sequence
  Artificially Synthesized Peptide
LPIHTAELLA

SEQ ID NO: 1871 - protein, 10 aa, Artificial Sequence
  Artificially Synthesized Peptide
LPKVLHKRTL

SEQ ID NO: 1872 - protein, 10 aa, Artificial Sequence
  Artificially Synthesized Peptide
LPLDKGIKPY

SEQ ID NO: 1873 - protein, 10 aa, Artificial Sequence
  Artificially Synthesized Peptide
LVLLDYQGML

SEQ ID NO: 1874 - protein, 10 aa, Artificial Sequence
  Artificially Synthesized Peptide
LVLQAGFFLL

SEQ ID NO: 1875 - protein, 10 aa, Artificial Sequence
  Artificially Synthesized Peptide
MMWYWGPSLY

SEQ ID NO: 1876 - protein, 10 aa, Artificial Sequence
  Artificially Synthesized Peptide
NLLSSNLSWL

SEQ ID NO: 1877 - protein, 10 aa, Artificial Sequence
  Artificially Synthesized Peptide
NLSVPNPLGF

SEQ ID NO: 1878 - protein, 10 aa, Artificial Sequence
  Artificially Synthesized Peptide
NPNKTKRWGY

SEQ ID NO: 1879 - protein, 10 aa, Artificial Sequence
  Artificially Synthesized Peptide
NVSIPWTHKV

SEQ ID NO: 1880 - protein, 10 aa, Artificial Sequence
  Artificially Synthesized Peptide
PIDWKVCQRI

SEQ ID NO: 1881 - protein, 10 aa, Artificial Sequence
  Artificially Synthesized Peptide
PIFFCLWVYI

SEQ ID NO: 1882 - protein, 10 aa, Artificial Sequence
  Artificially Synthesized Peptide
PIHTAELLAA

SEQ ID NO: 1883 - protein, 10 aa, Artificial Sequence
  Artificially Synthesized Peptide
PLDKGIKPYY

SEQ ID NO: 1884 - protein, 10 aa, Artificial Sequence
  Artificially Synthesized Peptide
PLEEELPRLA

SEQ ID NO: 1885 - protein, 10 aa, Artificial Sequence
  Artificially Synthesized Peptide
PLGFFPDHQL

SEQ ID NO: 1886 - protein, 10 aa, Artificial Sequence
  Artificially Synthesized Peptide
PLHPAAMPHL

SEQ ID NO: 1887 - protein, 10 aa, Artificial Sequence
  Artificially Synthesized Peptide
PLLPIFFCLW

SEQ ID NO: 1888 - protein, 10 aa, Artificial Sequence
  Artificially Synthesized Peptide
PLLVLQAGFF

SEQ ID NO: 1889 - protein, 10 aa, Artificial Sequence
  Artificially Synthesized Peptide
PLPIHTAELL

SEQ ID NO: 1890 - protein, 10 aa, Artificial Sequence
  Artificially Synthesized Peptide
PLSYQHFRKL

SEQ ID NO: 1891 - protein, 10 aa, Artificial Sequence
  Artificially Synthesized Peptide
PLTVNEKRRL

SEQ ID NO: 1892 - protein, 10 aa, Artificial Sequence
  Artificially Synthesized Peptide
PMGVGLSPFL

SEQ ID NO: 1893 - protein, 10 aa, Artificial Sequence
  Artificially Synthesized Peptide
PPNAPILSTL

SEQ ID NO: 1894 - protein, 10 aa, Artificial Sequence
  Artificially Synthesized Peptide
PVNRPIDWKV

SEQ ID NO: 1895 - protein, 10 aa, Artificial Sequence
  Artificially Synthesized Peptide
QLLWFHISCL

SEQ ID NO: 1896 - protein, 10 aa, Artificial Sequence
  Artificially Synthesized Peptide
RIVGLLGFAA

SEQ ID NO: 1897 - protein, 10 aa, Artificial Sequence
  Artificially Synthesized Peptide
RLKLIMPARF

SEQ ID NO: 1898 - protein, 10 aa, Artificial Sequence
  Artificially Synthesized Peptide
RQAILCWGEL

SEQ ID NO: 1899 - protein, 10 aa, Artificial Sequence
  Artificially Synthesized Peptide
RVHFASPLHV

SEQ ID NO: 1900 - protein, 10 aa, Artificial Sequence
  Artificially Synthesized Peptide
SLLVPFVQWF

SEQ ID NO: 1901 - protein, 10 aa, Artificial Sequence
  Artificially Synthesized Peptide
SLRGLPVCAF

SEQ ID NO: 1902 - protein, 10 aa, Artificial Sequence
  Artificially Synthesized Peptide
SLTNLLSSNL

SEQ ID NO: 1903 - protein, 10 aa, Artificial Sequence
  Artificially Synthesized Peptide
SPHHTALRQA

SEQ ID NO: 1904 - protein, 10 aa, Artificial Sequence
  Artificially Synthesized Peptide
SPTVWLSVIW

SEQ ID NO: 1905 - protein, 10 aa, Artificial Sequence
  Artificially Synthesized Peptide
SVRFSWLSLL

SEQ ID NO: 1906 - protein, 10 aa, Artificial Sequence
  Artificially Synthesized Peptide
TIPQSLDSWW

SEQ ID NO: 1907 - protein, 10 aa, Artificial Sequence
  Artificially Synthesized Peptide
TPARVTGGVF

SEQ ID NO: 1908 - protein, 10 aa, Artificial Sequence
  Artificially Synthesized Peptide
TPPAYRPPNA

SEQ ID NO: 1909 - protein, 10 aa, Artificial Sequence
  Artificially Synthesized Peptide
TPPHGGLLGW

SEQ ID NO: 1910 - protein, 10 aa, Artificial Sequence
  Artificially Synthesized Peptide
VLGAKSVQHL

SEQ ID NO: 1911 - protein, 10 aa, Artificial Sequence
  Artificially Synthesized Peptide
VLGGCRHKLV

SEQ ID NO: 1912 - protein, 10 aa, Artificial Sequence
  Artificially Synthesized Peptide
VPFVQWFVGL

SEQ ID NO: 1913 - protein, 10 aa, Artificial Sequence
  Artificially Synthesized Peptide
VPNLQSLTNL

SEQ ID NO: 1914 - protein, 10 aa, Artificial Sequence
  Artificially Synthesized Peptide
VQASKLCLGW

SEQ ID NO: 1915 - protein, 10 aa, Artificial Sequence
  Artificially Synthesized Peptide
VVLSRKYTSF

SEQ ID NO: 1916 - protein, 10 aa, Artificial Sequence
  Artificially Synthesized Peptide
VVRRAFPHCL

SEQ ID NO: 1917 - protein, 10 aa, Artificial Sequence
  Artificially Synthesized Peptide
WILRGTSFVY

SEQ ID NO: 1918 - protein, 10 aa, Artificial Sequence
  Artificially Synthesized Peptide
WLLGCAANWI

SEQ ID NO: 1919 - protein, 10 aa, Artificial Sequence
  Artificially Synthesized Peptide
WLSLDVSAAF

SEQ ID NO: 1920 - protein, 10 aa, Artificial Sequence
  Artificially Synthesized Peptide
WLWGMDIDPY

SEQ ID NO: 1921 - protein, 10 aa, Artificial Sequence
  Artificially Synthesized Peptide
WMCLRRFIIF

SEQ ID NO: 1922 - protein, 10 aa, Artificial Sequence
  Artificially Synthesized Peptide
WMMWYWGPSL

SEQ ID NO: 1923 - protein, 10 aa, Artificial Sequence
  Artificially Synthesized Peptide
YLHTLWKAGI

SEQ ID NO: 1924 - protein, 10 aa, Artificial Sequence
  Artificially Synthesized Peptide
YQGMLPVCPL

SEQ ID NO: 1925 - protein, 10 aa, Artificial Sequence
  Artificially Synthesized Peptide
YQHFRKLLLL

SEQ ID NO: 1926 - protein, 11 aa, Artificial Sequence
  Artificially Synthesized Peptide
APFTQCGYPAL

SEQ ID NO: 1927 - protein, 11 aa, Artificial Sequence
  Artificially Synthesized Peptide
AQFTSAICSVV

SEQ ID NO: 1928 - protein, 11 aa, Artificial Sequence
  Artificially Synthesized Peptide
AVPNLQSLTNL

SEQ ID NO: 1929 - protein, 11 aa, Artificial Sequence
  Artificially Synthesized Peptide
CIPIPSSWAFA

SEQ ID NO: 1930 - protein, 11 aa, Artificial Sequence
  Artificially Synthesized Peptide
CLAFSYMDDVV

SEQ ID NO: 1931 - protein, 11 aa, Artificial Sequence
  Artificially Synthesized Peptide
CLIFLLVLLDY

SEQ ID NO: 1932 - protein, 11 aa, Artificial Sequence
  Artificially Synthesized Peptide
CLRRFIIFLFI

SEQ ID NO: 1933 - protein, 11 aa, Artificial Sequence
  Artificially Synthesized Peptide
CPTVQASKLCL

SEQ ID NO: 1934 - protein, 11 aa, Artificial Sequence
  Artificially Synthesized Peptide
CQRIVGLLGFA

SEQ ID NO: 1935 - protein, 11 aa, Artificial Sequence
  Artificially Synthesized Peptide
DLNLGNLNVSI

SEQ ID NO: 1936 - protein, 11 aa, Artificial Sequence
  Artificially Synthesized Peptide
ELLSFLPSDFF

SEQ ID NO: 1937 - protein, 11 aa, Artificial Sequence
  Artificially Synthesized Peptide
FILLLCLIFLL

SEQ ID NO: 1938 - protein, 11 aa, Artificial Sequence
  Artificially Synthesized Peptide
FLFILLLCLIF

SEQ ID NO: 1939 - protein, 11 aa, Artificial Sequence
  Artificially Synthesized Peptide
FLLVLLDYQGM

SEQ ID NO: 1940 - protein, 11 aa, Artificial Sequence
  Artificially Synthesized Peptide
FPAGGSSSGTV

SEQ ID NO: 1941 - protein, 11 aa, Artificial Sequence
  Artificially Synthesized Peptide
FPWLLGCAANW

SEQ ID NO: 1942 - protein, 11 aa, Artificial Sequence
  Artificially Synthesized Peptide
FVLGGCRHKLV

SEQ ID NO: 1943 - protein, 11 aa, Artificial Sequence
  Artificially Synthesized Peptide
FVYVPSALNPA

SEQ ID NO: 1944 - protein, 11 aa, Artificial Sequence
  Artificially Synthesized Peptide
GLSPTVWLSVI

SEQ ID NO: 1945 - protein, 11 aa, Artificial Sequence
  Artificially Synthesized Peptide
GPLEEELPRLA

SEQ ID NO: 1946 - protein, 11 aa, Artificial Sequence
  Artificially Synthesized Peptide
GPLLVLQAGFF

SEQ ID NO: 1947 - protein, 11 aa, Artificial Sequence
  Artificially Synthesized Peptide
GPLTVNEKRRL

SEQ ID NO: 1948 - protein, 11 aa, Artificial Sequence
  Artificially Synthesized Peptide
HLSLRGLPVCA

SEQ ID NO: 1949 - protein, 11 aa, Artificial Sequence
  Artificially Synthesized Peptide
HLYSHPIILGF

SEQ ID NO: 1950 - protein, 11 aa, Artificial Sequence
  Artificially Synthesized Peptide
IIFLFILLLCL

SEQ ID NO: 1951 - protein, 11 aa, Artificial Sequence
  Artificially Synthesized Peptide
ILLLCLIFLLV

SEQ ID NO: 1952 - protein, 11 aa, Artificial Sequence
  Artificially Synthesized Peptide
ILSTLPETTVV

SEQ ID NO: 1953 - protein, 11 aa, Artificial Sequence
  Artificially Synthesized Peptide
ILTIPQSLDSW

SEQ ID NO: 1954 - protein, 11 aa, Artificial Sequence
  Artificially Synthesized Peptide
IPMGVGLSPFL

SEQ ID NO: 1955 - protein, 11 aa, Artificial Sequence
  Artificially Synthesized Peptide
IVGLLGFAAPF

SEQ ID NO: 1956 - protein, 11 aa, Artificial Sequence
  Artificially Synthesized Peptide
KIPMGVGLSPF

SEQ ID NO: 1957 - protein, 11 aa, Artificial Sequence
  Artificially Synthesized Peptide
KLHLYSHPIIL

SEQ ID NO: 1958 - protein, 11 aa, Artificial Sequence
  Artificially Synthesized Peptide
LLCLIFLLVLL

SEQ ID NO: 1959 - protein, 11 aa, Artificial Sequence
  Artificially Synthesized Peptide
LLGWSPQAQGI

SEQ ID NO: 1960 - protein, 11 aa, Artificial Sequence
  Artificially Synthesized Peptide
LLLCLIFLLVL

SEQ ID NO: 1961 - protein, 11 aa, Artificial Sequence
  Artificially Synthesized Peptide
LLPIFFCLWVY

SEQ ID NO: 1962 - protein, 11 aa, Artificial Sequence
  Artificially Synthesized Peptide
LLSSNLSWLSL

SEQ ID NO: 1963 - protein, 11 aa, Artificial Sequence
  Artificially Synthesized Peptide
LLVLLDYQGML

SEQ ID NO: 1964 - protein, 11 aa, Artificial Sequence
  Artificially Synthesized Peptide
LLVLQAGFFLL

SEQ ID NO: 1965 - protein, 11 aa, Artificial Sequence
  Artificially Synthesized Peptide
LLWFHISCLTF

SEQ ID NO: 1966 - protein, 11 aa, Artificial Sequence
  Artificially Synthesized Peptide
LPIFFCLWVYI

SEQ ID NO: 1967 - protein, 11 aa, Artificial Sequence
  Artificially Synthesized Peptide
LPIHTAELLAA

SEQ ID NO: 1968 - protein, 11 aa, Artificial Sequence
  Artificially Synthesized Peptide
LPLDKGIKPYY

SEQ ID NO: 1969 - protein, 11 aa, Artificial Sequence
  Artificially Synthesized Peptide
LPVNRPIDWKV

SEQ ID NO: 1970 - protein, 11 aa, Artificial Sequence
  Artificially Synthesized Peptide
LQAGFFLLTRI

SEQ ID NO: 1971 - protein, 11 aa, Artificial Sequence
  Artificially Synthesized Peptide
LVPFVQWFVGL

SEQ ID NO: 1972 - protein, 11 aa, Artificial Sequence
  Artificially Synthesized Peptide
MPHLLVGSSGL

SEQ ID NO: 1973 - protein, 11 aa, Artificial Sequence
  Artificially Synthesized Peptide
MPLSYQHFRKL

SEQ ID NO: 1974 - protein, 11 aa, Artificial Sequence
  Artificially Synthesized Peptide
NLGNLNVSIPW

SEQ ID NO: 1975 - protein, 11 aa, Artificial Sequence
  Artificially Synthesized Peptide
NLSWLSLDVSA

SEQ ID NO: 1976 - protein, 11 aa, Artificial Sequence
  Artificially Synthesized Peptide
NPADDPSRGRL

SEQ ID NO: 1977 - protein, 11 aa, Artificial Sequence
  Artificially Synthesized Peptide
NPLGFFPDHQL

SEQ ID NO: 1978 - protein, 11 aa, Artificial Sequence
  Artificially Synthesized Peptide
PIDWKVCQRIV

SEQ ID NO: 1979 - protein, 11 aa, Artificial Sequence
  Artificially Synthesized Peptide
PIILGFRKIPM

SEQ ID NO: 1980 - protein, 11 aa, Artificial Sequence
  Artificially Synthesized Peptide
PILSTLPETTV

SEQ ID NO: 1981 - protein, 11 aa, Artificial Sequence
  Artificially Synthesized Peptide
PLHPAAMPHLL

SEQ ID NO: 1982 - protein, 11 aa, Artificial Sequence
  Artificially Synthesized Peptide
PLLPIFFCLWV

SEQ ID NO: 1983 - protein, 11 aa, Artificial Sequence
  Artificially Synthesized Peptide
PLLVLQAGFFL

SEQ ID NO: 1984 - protein, 11 aa, Artificial Sequence
  Artificially Synthesized Peptide
PLPIHTAELLA

SEQ ID NO: 1985 - protein, 11 aa, Artificial Sequence
  Artificially Synthesized Peptide
PLSYQHFRKLL

SEQ ID NO: 1986 - protein, 11 aa, Artificial Sequence
  Artificially Synthesized Peptide
PMGVGLSPFLL

SEQ ID NO: 1987 - protein, 11 aa, Artificial Sequence
  Artificially Synthesized Peptide
PPAYRPPNAPI

SEQ ID NO: 1988 - protein, 11 aa, Artificial Sequence
  Artificially Synthesized Peptide
PQAMQWNSTTF

SEQ ID NO: 1989 - protein, 11 aa, Artificial Sequence
  Artificially Synthesized Peptide
PQSLDSWWTSL

SEQ ID NO: 1990 - protein, 11 aa, Artificial Sequence
  Artificially Synthesized Peptide
QLDPARDVLCL

SEQ ID NO: 1991 - protein, 11 aa, Artificial Sequence
  Artificially Synthesized Peptide
QVFADATPTGW

SEQ ID NO: 1992 - protein, 11 aa, Artificial Sequence
  Artificially Synthesized Peptide
RLKLIMPARFY

SEQ ID NO: 1993 - protein, 11 aa, Artificial Sequence
  Artificially Synthesized Peptide
RPIDWKVCQRI

SEQ ID NO: 1994 - protein, 11 aa, Artificial Sequence
  Artificially Synthesized Peptide
RPPNAPILSTL

SEQ ID NO: 1995 - protein, 11 aa, Artificial Sequence
  Artificially Synthesized Peptide
RQAILCWGELM

SEQ ID NO: 1996 - protein, 11 aa, Artificial Sequence
  Artificially Synthesized Peptide
RQLLWFHISCL

SEQ ID NO: 1997 - protein, 11 aa, Artificial Sequence
  Artificially Synthesized Peptide
RVAEDLNLGNL

SEQ ID NO: 1998 - protein, 11 aa, Artificial Sequence
  Artificially Synthesized Peptide
RVHFASPLHVA

SEQ ID NO: 1999 - protein, 11 aa, Artificial Sequence
  Artificially Synthesized Peptide
SIPWTHKVGNF

SEQ ID NO: 2000 - protein, 11 aa, Artificial Sequence
  Artificially Synthesized Peptide
SLDSWWTSLNF

SEQ ID NO: 2001 - protein, 11 aa, Artificial Sequence
  Artificially Synthesized Peptide
SLLVPFVQWFV

SEQ ID NO: 2002 - protein, 11 aa, Artificial Sequence
  Artificially Synthesized Peptide
SPEHCSPHHTA

SEQ ID NO: 2003 - protein, 11 aa, Artificial Sequence
  Artificially Synthesized Peptide
SPFLLAQFTSA

SEQ ID NO: 2004 - protein, 11 aa, Artificial Sequence
  Artificially Synthesized Peptide
SPHHTALRQAI

SEQ ID NO: 2005 - protein, 11 aa, Artificial Sequence
  Artificially Synthesized Peptide
SPTVWLSVIWM

SEQ ID NO: 2006 - protein, 11 aa, Artificial Sequence
  Artificially Synthesized Peptide
SVRFSWLSLLV

SEQ ID NO: 2007 - protein, 11 aa, Artificial Sequence
  Artificially Synthesized Peptide
SVVLSRKYTSF

SEQ ID NO: 2008 - protein, 11 aa, Artificial Sequence
  Artificially Synthesized Peptide
SVVRRAFPHCL

SEQ ID NO: 2009 - protein, 11 aa, Artificial Sequence
  Artificially Synthesized Peptide
TPARVTGGVFL

SEQ ID NO: 2010 - protein, 11 aa, Artificial Sequence
  Artificially Synthesized Peptide
TQCGYPALMPL

SEQ ID NO: 2011 - protein, 11 aa, Artificial Sequence
  Artificially Synthesized Peptide
TVQASKLCLGW

SEQ ID NO: 2012 - protein, 11 aa, Artificial Sequence
  Artificially Synthesized Peptide
VLLDYQGMLPV

SEQ ID NO: 2013 - protein, 11 aa, Artificial Sequence
  Artificially Synthesized Peptide
VLSRKYTSFPW

SEQ ID NO: 2014 - protein, 11 aa, Artificial Sequence
  Artificially Synthesized Peptide
VPNLQSLTNLL

SEQ ID NO: 2015 - protein, 11 aa, Artificial Sequence
  Artificially Synthesized Peptide
VQASKLCLGWL

SEQ ID NO: 2016 - protein, 11 aa, Artificial Sequence
  Artificially Synthesized Peptide
VQWFVGLSPTV

SEQ ID NO: 2017 - protein, 11 aa, Artificial Sequence
  Artificially Synthesized Peptide
VVLGAKSVQHL

SEQ ID NO: 2018 - protein, 11 aa, Artificial Sequence
  Artificially Synthesized Peptide
VVRRAFPHCLA

SEQ ID NO: 2019 - protein, 11 aa, Artificial Sequence
  Artificially Synthesized Peptide
WILRGTSFVYV

SEQ ID NO: 2020 - protein, 11 aa, Artificial Sequence
  Artificially Synthesized Peptide
WLLGCAANWIL

SEQ ID NO: 2021 - protein, 11 aa, Artificial Sequence
  Artificially Synthesized Peptide
WLSLDVSAAFY

SEQ ID NO: 2022 - protein, 11 aa, Artificial Sequence
  Artificially Synthesized Peptide
WLSLLVPFVQW

SEQ ID NO: 2023 - protein, 11 aa, Artificial Sequence
  Artificially Synthesized Peptide
WMCLRRFIIFL

SEQ ID NO: 2024 - protein, 11 aa, Artificial Sequence
  Artificially Synthesized Peptide
WMMWYWGPSLY

SEQ ID NO: 2025 - protein, 11 aa, Artificial Sequence
  Artificially Synthesized Peptide
YLHTLWKAGIL

SEQ ID NO: 2026 - protein, 11 aa, Artificial Sequence
  Artificially Synthesized Peptide
YLPLDKGIKPY

SEQ ID NO: 2027 - protein, 11 aa, Artificial Sequence
  Artificially Synthesized Peptide
YPALMPLYACI

SEQ ID NO: 2028 - protein, 8 aa, Artificial Sequence
  Artificially Synthesized Peptide
ASFCGSPY

SEQ ID NO: 2029 - protein, 10 aa, Artificial Sequence
  Artificially Synthesized Peptide
DNSVVLSRKY

SEQ ID NO: 2030 - protein, 10 aa, Artificial Sequence
  Artificially Synthesized Peptide
FAAPFTQCGY

SEQ ID NO: 2031 - protein, 11 aa, Artificial Sequence
  Artificially Synthesized Peptide
GFAAPFTQCGY

SEQ ID NO: 2032 - protein, 8 aa, Artificial Sequence
  Artificially Synthesized Peptide
GRETVLEY

SEQ ID NO: 2033 - protein, 9 aa, Artificial Sequence
  Artificially Synthesized Peptide
GYSLNFMGY

SEQ ID NO: 2034 - protein, 10 aa, Artificial Sequence
  Artificially Synthesized Peptide
HTLWKAGILY

SEQ ID NO: 2035 - protein, 10 aa, Artificial Sequence
  Artificially Synthesized Peptide
KQAFTFSPTY

SEQ ID NO: 2036 - protein, 9 aa, Artificial Sequence
  Artificially Synthesized Peptide
LLDTASALY

SEQ ID NO: 2037 - protein, 10 aa, Artificial Sequence
  Artificially Synthesized Peptide
LSLDVSAAFY

SEQ ID NO: 2038 - protein, 11 aa, Artificial Sequence
  Artificially Synthesized Peptide
LTFGRETVLEY

SEQ ID NO: 2039 - protein, 10 aa, Artificial Sequence
  Artificially Synthesized Peptide
MMWYWGPSLY

SEQ ID NO: 2040 - protein, 9 aa, Artificial Sequence
  Artificially Synthesized Peptide
MSTTDLEAY

SEQ ID NO: 2041 - protein, 9 aa, Artificial Sequence
  Artificially Synthesized Peptide
NSVVLSRKY

SEQ ID NO: 2042 - protein, 9 aa, Artificial Sequence
  Artificially Synthesized Peptide
PLDKGIKPY

SEQ ID NO: 2043 - protein, 10 aa, Artificial Sequence
  Artificially Synthesized Peptide
PLDKGIKPYY

SEQ ID NO: 2044 - protein, 9 aa, Artificial Sequence
  Artificially Synthesized Peptide
PTTGRTSLY

SEQ ID NO: 2045 - protein, 9 aa, Artificial Sequence
  Artificially Synthesized Peptide
SASFCGSPY

SEQ ID NO: 2046 - protein, 9 aa, Artificial Sequence
  Artificially Synthesized Peptide
SLDVSAAFY

SEQ ID NO: 2047 - protein, 8 aa, Artificial Sequence
  Artificially Synthesized Peptide
STTDLEAY

SEQ ID NO: 2048 - protein, 8 aa, Artificial Sequence
  Artificially Synthesized Peptide
TTGRTSLY

SEQ ID NO: 2049 - protein, 11 aa, Artificial Sequence
  Artificially Synthesized Peptide
WLSLDVSAAFY

SEQ ID NO: 2050 - protein, 11 aa, Artificial Sequence
  Artificially Synthesized Peptide
WMMWYWGPSLY

SEQ ID NO: 2051 - protein, 8 aa, Artificial Sequence
  Artificially Synthesized Peptide
YPALMPLY

SEQ ID NO: 2052 - protein, 8 aa, Artificial Sequence
  Artificially Synthesized Peptide
YSLNFMGY

SEQ ID NO: 2053 - protein, 8 aa, Artificial Sequence
  Artificially Synthesized Peptide
AACFARSR

SEQ ID NO: 2054 - protein, 11 aa, Artificial Sequence
  Artificially Synthesized Peptide
AACFARSRSGA

SEQ ID NO: 2055 - protein, 9 aa, Artificial Sequence
  Artificially Synthesized Peptide
AAPFTQCGY

SEQ ID NO: 2056 - protein, 11 aa, Artificial Sequence
  Artificially Synthesized Peptide
AAPFTQCGYPA

SEQ ID NO: 2057 - protein, 10 aa, Artificial Sequence
  Artificially Synthesized Peptide
ACFARSRSGA

SEQ ID NO: 2058 - protein, 11 aa, Artificial Sequence
  Artificially Synthesized Peptide
ADATPTGWGLA

SEQ ID NO: 2059 - protein, 8 aa, Artificial Sequence
  Artificially Synthesized Peptide
ADDPSRGR

SEQ ID NO: 2060 - protein, 8 aa, Artificial Sequence
  Artificially Synthesized Peptide
AFPHCLAF

SEQ ID NO: 2061 - protein, 10 aa, Artificial Sequence
  Artificially Synthesized Peptide
AFPHCLAFSY

SEQ ID NO: 2062 - protein, 9 aa, Artificial Sequence
  Artificially Synthesized Peptide
AFSSAGPCA

SEQ ID NO: 2063 - protein, 11 aa, Artificial Sequence
  Artificially Synthesized Peptide
AFSSAGPCALR

SEQ ID NO: 2064 - protein, 8 aa, Artificial Sequence
  Artificially Synthesized Peptide
AFTFSPTY

SEQ ID NO: 2065 - protein, 9 aa, Artificial Sequence
  Artificially Synthesized Peptide
AFTFSPTYK

SEQ ID NO: 2066 - protein, 10 aa, Artificial Sequence
  Artificially Synthesized Peptide
AFTFSPTYKA

SEQ ID NO: 2067 - protein, 11 aa, Artificial Sequence
  Artificially Synthesized Peptide
AFTFSPTYKAF

SEQ ID NO: 2068 - protein, 8 aa, Artificial Sequence
  Artificially Synthesized Peptide
AGFFLLTR

SEQ ID NO: 2069 - protein, 8 aa, Artificial Sequence
  Artificially Synthesized Peptide
AGPCALRF

SEQ ID NO: 2070 - protein, 11 aa, Artificial Sequence
  Artificially Synthesized Peptide
AGPCALRFTSA

SEQ ID NO: 2071 - protein, 10 aa, Artificial Sequence
  Artificially Synthesized Peptide
AGPLEEELPR

SEQ ID NO: 2072 - protein, 8 aa, Artificial Sequence
  Artificially Synthesized Peptide
AICSVVRR

SEQ ID NO: 2073 - protein, 9 aa, Artificial Sequence
  Artificially Synthesized Peptide
AICSVVRRA

SEQ ID NO: 2074 - protein, 10 aa, Artificial Sequence
  Artificially Synthesized Peptide
AICSVVRRAF

SEQ ID NO: 2075 - protein, 11 aa, Artificial Sequence
  Artificially Synthesized Peptide
ALESPEHCSPH

SEQ ID NO: 2076 - protein, 10 aa, Artificial Sequence
  Artificially Synthesized Peptide
ALNPADDPSR

SEQ ID NO: 2077 - protein, 8 aa, Artificial Sequence
  Artificially Synthesized Peptide
ALRFTSAR

SEQ ID NO: 2078 - protein, 9 aa, Artificial Sequence
  Artificially Synthesized Peptide
AMQWNSTTF

SEQ ID NO: 2079 - protein, 10 aa, Artificial Sequence
  Artificially Synthesized Peptide
AMQWNSTTFH

SEQ ID NO: 2080 - protein, 9 aa, Artificial Sequence
  Artificially Synthesized Peptide
AMSITDLEA

SEQ ID NO: 2081 - protein, 8 aa, Artificial Sequence
  Artificially Synthesized Peptide
ASALYREA

SEQ ID NO: 2082 - protein, 8 aa, Artificial Sequence
  Artificially Synthesized Peptide
ASFCGSPY

SEQ ID NO: 2083 - protein, 9 aa, Artificial Sequence
  Artificially Synthesized Peptide
ASPLHVAWR

SEQ ID NO: 2084 - protein, 9 aa, Artificial Sequence
  Artificially Synthesized Peptide
ASTNRQSGR

SEQ ID NO: 2085 - protein, 9 aa, Artificial Sequence
  Artificially Synthesized Peptide
ATPTGWGLA

SEQ ID NO: 2086 - protein, 8 aa, Artificial Sequence
  Artificially Synthesized Peptide
CAANWILR

SEQ ID NO: 2087 - protein, 10 aa, Artificial Sequence
  Artificially Synthesized Peptide
CAFSSAGPCA

SEQ ID NO: 2088 - protein, 8 aa, Artificial Sequence
  Artificially Synthesized Peptide
CALRFTSA

SEQ ID NO: 2089 - protein, 9 aa, Artificial Sequence
  Artificially Synthesized Peptide
CALRFTSAR

SEQ ID NO: 2090 - protein, 8 aa, Artificial Sequence
  Artificially Synthesized Peptide
CCQLDPAR

SEQ ID NO: 2091 - protein, 9 aa, Artificial Sequence
  Artificially Synthesized Peptide
CFARSRSGA

SEQ ID NO: 2092 - protein, 9 aa, Artificial Sequence
  Artificially Synthesized Peptide
CFRKLPVNR

SEQ ID NO: 2093 - protein, 10 aa, Artificial Sequence
  Artificially Synthesized Peptide
CGYPALMPLY

SEQ ID NO: 2094 - protein, 11 aa, Artificial Sequence
  Artificially Synthesized Peptide
CGYPALMPLYA

SEQ ID NO: 2095 - protein, 9 aa, Artificial Sequence
  Artificially Synthesized Peptide
CIPIPSSWA

SEQ ID NO: 2096 - protein, 10 aa, Artificial Sequence
  Artificially Synthesized Peptide
CIPIPSSWAF

SEQ ID NO: 2097 - protein, 11 aa, Artificial Sequence
  Artificially Synthesized Peptide
CIPIPSSWAFA

SEQ ID NO: 2098 - protein, 11 aa, Artificial Sequence
  Artificially Synthesized Peptide
CLIFLLVLLDY

SEQ ID NO: 2099 - protein, 10 aa, Artificial Sequence
  Artificially Synthesized Peptide
CLRPVGAESR

SEQ ID NO: 2100 - protein, 8 aa, Artificial Sequence
  Artificially Synthesized Peptide
CLRRFIIF

SEQ ID NO: 2101 - protein, 10 aa, Artificial Sequence
  Artificially Synthesized Peptide
CLRRFIIFLF

SEQ ID NO: 2102 - protein, 9 aa, Artificial Sequence
  Artificially Synthesized Peptide
CSPHHTALR

SEQ ID NO: 2103 - protein, 11 aa, Artificial Sequence
  Artificially Synthesized Peptide
CSPHHTALRQA

SEQ ID NO: 2104 - protein, 8 aa, Artificial Sequence
  Artificially Synthesized Peptide
CSVVRRAF

SEQ ID NO: 2105 - protein, 10 aa, Artificial Sequence
  Artificially Synthesized Peptide
CSVVRRAFPH

SEQ ID NO: 2106 - protein, 11 aa, Artificial Sequence
  Artificially Synthesized Peptide
CTCIPIPSSWA

SEQ ID NO: 2107 - protein, 10 aa, Artificial Sequence
  Artificially Synthesized Peptide
DATPTGWGLA

SEQ ID NO: 2108 - protein, 8 aa, Artificial Sequence
  Artificially Synthesized Peptide
DDVVLGAK

SEQ ID NO: 2109 - protein, 8 aa, Artificial Sequence
  Artificially Synthesized Peptide
DIDPYKEF

SEQ ID NO: 2110 - protein, 10 aa, Artificial Sequence
  Artificially Synthesized Peptide
DIDPYKEFGA

SEQ ID NO: 2111 - protein, 8 aa, Artificial Sequence
  Artificially Synthesized Peptide
DLLDTASA

SEQ ID NO: 2112 - protein, 10 aa, Artificial Sequence
  Artificially Synthesized Peptide
DLLDTASALY

SEQ ID NO: 2113 - protein, 11 aa, Artificial Sequence
  Artificially Synthesized Peptide
DLLDTASALYR

SEQ ID NO: 2114 - protein, 9 aa, Artificial Sequence
  Artificially Synthesized Peptide
DSWWTSLNF

SEQ ID NO: 2115 - protein, 8 aa, Artificial Sequence
  Artificially Synthesized Peptide
DTASALYR

SEQ ID NO: 2116 - protein, 10 aa, Artificial Sequence
  Artificially Synthesized Peptide
DTASALYREA

SEQ ID NO: 2117 - protein, 10 aa, Artificial Sequence
  Artificially Synthesized Peptide
DVLCLRPVGA

SEQ ID NO: 2118 - protein, 8 aa, Artificial Sequence
  Artificially Synthesized Peptide
DVSAAFYH

SEQ ID NO: 2119 - protein, 11 aa, Artificial Sequence
  Artificially Synthesized Peptide
DVVLGAKSVQH

SEQ ID NO: 2120 - protein, 11 aa, Artificial Sequence
  Artificially Synthesized Peptide
EAGPLEEELPR

SEQ ID NO: 2121 - protein, 8 aa, Artificial Sequence
  Artificially Synthesized Peptide
EALESPEH

SEQ ID NO: 2122 - protein, 8 aa, Artificial Sequence
  Artificially Synthesized Peptide
ELLAACFA

SEQ ID NO: 2123 - protein, 9 aa, Artificial Sequence
  Artificially Synthesized Peptide
ELLAACFAR

SEQ ID NO: 2124 - protein, 11 aa, Artificial Sequence
  Artificially Synthesized Peptide
ELLAACFARSR

SEQ ID NO: 2125 - protein, 10 aa, Artificial Sequence
  Artificially Synthesized Peptide
ELLSFLPSDF

SEQ ID NO: 2126 - protein, 11 aa, Artificial Sequence
  Artificially Synthesized Peptide
ELLSFLPSDFF

SEQ ID NO: 2127 - protein, 9 aa, Artificial Sequence
  Artificially Synthesized Peptide
ESPEHCSPH

SEQ ID NO: 2128 - protein, 10 aa, Artificial Sequence
  Artificially Synthesized Peptide
ESPEHCSPHH

SEQ ID NO: 2129 - protein, 8 aa, Artificial Sequence
  Artificially Synthesized Peptide
ESRLVVDF

SEQ ID NO: 2130 - protein, 11 aa, Artificial Sequence
  Artificially Synthesized Peptide
ESRLVVDFSQF

SEQ ID NO: 2131 - protein, 8 aa, Artificial Sequence
  Artificially Synthesized Peptide
ETTVVRRR

SEQ ID NO: 2132 - protein, 10 aa, Artificial Sequence
  Artificially Synthesized Peptide
ETTVVRRRGR

SEQ ID NO: 2133 - protein, 10 aa, Artificial Sequence
  Artificially Synthesized Peptide
FAAPFTQCGY

SEQ ID NO: 2134 - protein, 8 aa, Artificial Sequence
  Artificially Synthesized Peptide
FARSRSGA

SEQ ID NO: 2135 - protein, 8 aa, Artificial Sequence
  Artificially Synthesized Peptide
FASPLHVA

SEQ ID NO: 2136 - protein, 10 aa, Artificial Sequence
  Artificially Synthesized Peptide
FASPLHVAWR

SEQ ID NO: 2137 - protein, 10 aa, Artificial Sequence
  Artificially Synthesized Peptide
FFPDHQLDPA

SEQ ID NO: 2138 - protein, 11 aa, Artificial Sequence
  Artificially Synthesized Peptide
FFPDHQLDPAF

SEQ ID NO: 2139 - protein, 9 aa, Artificial Sequence
  Artificially Synthesized Peptide
FGRETVLEY

SEQ ID NO: 2140 - protein, 10 aa, Artificial Sequence
  Artificially Synthesized Peptide
FGVEPSGSGH

SEQ ID NO: 2141 - protein, 10 aa, Artificial Sequence
  Artificially Synthesized Peptide
FGVWIRTPPA

SEQ ID NO: 2142 - protein, 11 aa, Artificial Sequence
  Artificially Synthesized Peptide
FGVWIRTPPAY

SEQ ID NO: 2143 - protein, 9 aa, Artificial Sequence
  Artificially Synthesized Peptide
FILLLCLIF

SEQ ID NO: 2144 - protein, 11 aa, Artificial Sequence
  Artificially Synthesized Peptide
FLFILLLCLIF

SEQ ID NO: 2145 - protein, 10 aa, Artificial Sequence
  Artificially Synthesized Peptide
FLGPLLVLQA

SEQ ID NO: 2146 - protein, 9 aa, Artificial Sequence
  Artificially Synthesized Peptide
FLLAQFTSA

SEQ ID NO: 2147 - protein, 8 aa, Artificial Sequence
  Artificially Synthesized Peptide
FLLSLGIH

SEQ ID NO: 2148 - protein, 8 aa, Artificial Sequence
  Artificially Synthesized Peptide
FLLVLLDY

SEQ ID NO: 2149 - protein, 8 aa, Artificial Sequence
  Artificially Synthesized Peptide
FLVDKNPH

SEQ ID NO: 2150 - protein, 8 aa, Artificial Sequence
  Artificially Synthesized Peptide
FSPTYKAF

SEQ ID NO: 2151 - protein, 8 aa, Artificial Sequence
  Artificially Synthesized Peptide
FSSAGPCA

SEQ ID NO: 2152 - protein, 10 aa, Artificial Sequence
  Artificially Synthesized Peptide
FSSAGPCALR

SEQ ID NO: 2153 - protein, 11 aa, Artificial Sequence
  Artificially Synthesized Peptide
FSSAGPCALRF

SEQ ID NO: 2154 - protein, 10 aa, Artificial Sequence
  Artificially Synthesized Peptide
FSWLSLLVPF

SEQ ID NO: 2155 - protein, 11 aa, Artificial Sequence
  Artificially Synthesized Peptide
FSYMDDVVLGA

SEQ ID NO: 2156 - protein, 8 aa, Artificial Sequence
  Artificially Synthesized Peptide
FTFSPTYK

SEQ ID NO: 2157 - protein, 9 aa, Artificial Sequence
  Artificially Synthesized Peptide
FTFSPTYKA

SEQ ID NO: 2158 - protein, 10 aa, Artificial Sequence
  Artificially Synthesized Peptide
FTFSPTYKAF

SEQ ID NO: 2159 - protein, 8 aa, Artificial Sequence
  Artificially Synthesized Peptide
FTQCGYPA

SEQ ID NO: 2160 - protein, 10 aa, Artificial Sequence
  Artificially Synthesized Peptide
FTSAICSVVR

SEQ ID NO: 2161 - protein, 11 aa, Artificial Sequence
  Artificially Synthesized Peptide
FTSAICSVVRR

SEQ ID NO: 2162 - protein, 8 aa, Artificial Sequence
  Artificially Synthesized Peptide
FVLGGCRH

SEQ ID NO: 2163 - protein, 9 aa, Artificial Sequence
  Artificially Synthesized Peptide
FVLGGCRHK

SEQ ID NO: 2164 - protein, 11 aa, Artificial Sequence
  Artificially Synthesized Peptide
FVYVPSALNPA

SEQ ID NO: 2165 - protein, 9 aa, Artificial Sequence
  Artificially Synthesized Peptide
GCAANWILR

SEQ ID NO: 2166 - protein, 11 aa, Artificial Sequence
  Artificially Synthesized Peptide
GFAAPFTQCGY

SEQ ID NO: 2167 - protein, 11 aa, Artificial Sequence
  Artificially Synthesized Peptide
GFFPDHQLDPA

SEQ ID NO: 2168 - protein, 11 aa, Artificial Sequence
  Artificially Synthesized Peptide
GFLGPLLVLQA

SEQ ID NO: 2169 - protein, 10 aa, Artificial Sequence
  Artificially Synthesized Peptide
GGLLGWSPQA

SEQ ID NO: 2170 - protein, 8 aa, Artificial Sequence
  Artificially Synthesized Peptide
GGVFLVDK

SEQ ID NO: 2171 - protein, 11 aa, Artificial Sequence
  Artificially Synthesized Peptide
GGVFLVDKNPH

SEQ ID NO: 2172 - protein, 8 aa, Artificial Sequence
  Artificially Synthesized Peptide
GIHLNPNK

SEQ ID NO: 2173 - protein, 10 aa, Artificial Sequence
  Artificially Synthesized Peptide
GIHLNPNKTK

SEQ ID NO: 2174 - protein, 11 aa, Artificial Sequence
  Artificially Synthesized Peptide
GIHLNPNKTKR

SEQ ID NO: 2175 - protein, 9 aa, Artificial Sequence
  Artificially Synthesized Peptide
GLCQVFADA

SEQ ID NO: 2176 - protein, 9 aa, Artificial Sequence
  Artificially Synthesized Peptide
GLLGFAAPF

SEQ ID NO: 2177 - protein, 9 aa, Artificial Sequence
  Artificially Synthesized Peptide
GLLGWSPQA

SEQ ID NO: 2178 - protein, 10 aa, Artificial Sequence
  Artificially Synthesized Peptide
GLPVCAFSSA

SEQ ID NO: 2179 - protein, 8 aa, Artificial Sequence
  Artificially Synthesized Peptide
GLSPFLLA

SEQ ID NO: 2180 - protein, 10 aa, Artificial Sequence
  Artificially Synthesized Peptide
GLSPFLLAQF

SEQ ID NO: 2181 - protein, 8 aa, Artificial Sequence
  Artificially Synthesized Peptide
GMDIDPYK

SEQ ID NO: 2182 - protein, 10 aa, Artificial Sequence
  Artificially Synthesized Peptide
GMDIDPYKEF

SEQ ID NO: 2183 - protein, 10 aa, Artificial Sequence
  Artificially Synthesized Peptide
GTDNSVVLSR

SEQ ID NO: 2184 - protein, 11 aa, Artificial Sequence
  Artificially Synthesized Peptide
GTDNSVVLSRK

SEQ ID NO: 2185 - protein, 10 aa, Artificial Sequence
  Artificially Synthesized Peptide
GTSFVYVPSA

SEQ ID NO: 2186 - protein, 9 aa, Artificial Sequence
  Artificially Synthesized Peptide
GVEPSGSGH

SEQ ID NO: 2187 - protein, 10 aa, Artificial Sequence
  Artificially Synthesized Peptide
GVFLVDKNPH

SEQ ID NO: 2188 - protein, 10 aa, Artificial Sequence
  Artificially Synthesized Peptide
GVGLSPFLLA

SEQ ID NO: 2189 - protein, 9 aa, Artificial Sequence
  Artificially Synthesized Peptide
GVWIRTPPA

SEQ ID NO: 2190 - protein, 10 aa, Artificial Sequence
  Artificially Synthesized Peptide
GVWIRTPPAY

SEQ ID NO: 2191 - protein, 11 aa, Artificial Sequence
  Artificially Synthesized Peptide
GVWIRTPPAYR

SEQ ID NO: 2192 - protein, 8 aa, Artificial Sequence
  Artificially Synthesized Peptide
HCSPHHTA

SEQ ID NO: 2193 - protein, 10 aa, Artificial Sequence
  Artificially Synthesized Peptide
HCSPHHTALR

SEQ ID NO: 2194 - protein, 9 aa, Artificial Sequence
  Artificially Synthesized Peptide
HFASPLHVA

SEQ ID NO: 2195 - protein, 11 aa, Artificial Sequence
  Artificially Synthesized Peptide
HFASPLHVAWR

SEQ ID NO: 2196 - protein, 8 aa, Artificial Sequence
  Artificially Synthesized Peptide
HGAHLSLR

SEQ ID NO: 2197 - protein, 11 aa, Artificial Sequence
  Artificially Synthesized Peptide
HGGLLGWSPQA

SEQ ID NO: 2198 - protein, 9 aa, Artificial Sequence
  Artificially Synthesized Peptide
HISCLTFGR

SEQ ID NO: 2199 - protein, 8 aa, Artificial Sequence
  Artificially Synthesized Peptide
HLNPNKTK

SEQ ID NO: 2200 - protein, 9 aa, Artificial Sequence
  Artificially Synthesized Peptide
HLNPNKTKR

SEQ ID NO: 2201 - protein, 11 aa, Artificial Sequence
  Artificially Synthesized Peptide
HLSLRGLPVCA

SEQ ID NO: 2202 - protein, 11 aa, Artificial Sequence
  Artificially Synthesized Peptide
HLYSHPIILGF

SEQ ID NO: 2203 - protein, 8 aa, Artificial Sequence
  Artificially Synthesized Peptide
HTAELLAA

SEQ ID NO: 2204 - protein, 10 aa, Artificial Sequence
  Artificially Synthesized Peptide
HTAELLAACF

SEQ ID NO: 2205 - protein, 11 aa, Artificial Sequence
  Artificially Synthesized Peptide
HTAELLAACFA

SEQ ID NO: 2206 - protein, 10 aa, Artificial Sequence
  Artificially Synthesized Peptide
HTLWKAGILY

SEQ ID NO: 2207 - protein, 11 aa, Artificial Sequence
  Artificially Synthesized Peptide
HTLWKAGILYK

SEQ ID NO: 2208 - protein, 8 aa, Artificial Sequence
  Artificially Synthesized Peptide
ICSVVRRA

SEQ ID NO: 2209 - protein, 9 aa, Artificial Sequence
  Artificially Synthesized Peptide
ICSVVRRAF

SEQ ID NO: 2210 - protein, 11 aa, Artificial Sequence
  Artificially Synthesized Peptide
ICSVVRRAFPH

SEQ ID NO: 2211 - protein, 9 aa, Artificial Sequence
  Artificially Synthesized Peptide
IDPYKEFGA

SEQ ID NO: 2212 - protein, 8 aa, Artificial Sequence
  Artificially Synthesized Peptide
IDWKVCQR

SEQ ID NO: 2213 - protein, 8 aa, Artificial Sequence
  Artificially Synthesized Peptide
IFFCLWVY

SEQ ID NO: 2214 - protein, 9 aa, Artificial Sequence
  Artificially Synthesized Peptide
IFLLVLLDY

SEQ ID NO: 2215 - protein, 11 aa, Artificial Sequence
  Artificially Synthesized Peptide
IGTDNSVVLSR

SEQ ID NO: 2216 - protein, 8 aa, Artificial Sequence
  Artificially Synthesized Peptide
ILLLCLIF

SEQ ID NO: 2217 - protein, 9 aa, Artificial Sequence
  Artificially Synthesized Peptide
ILRGTSFVY

SEQ ID NO: 2218 - protein, 8 aa, Artificial Sequence
  Artificially Synthesized Peptide
ISCLTFGR

SEQ ID NO: 2219 - protein, 8 aa, Artificial Sequence
  Artificially Synthesized Peptide
IVGLLGFA

SEQ ID NO: 2220 - protein, 9 aa, Artificial Sequence
  Artificially Synthesized Peptide
IVGLLGFAA

SEQ ID NO: 2221 - protein, 11 aa, Artificial Sequence
  Artificially Synthesized Peptide
IVGLLGFAAPF

SEQ ID NO: 2222 - protein, 8 aa, Artificial Sequence
  Artificially Synthesized Peptide
KAGILYKR

SEQ ID NO: 2223 - protein, 11 aa, Artificial Sequence
  Artificially Synthesized Peptide
KIPMGVGLSPF

SEQ ID NO: 2224 - protein, 8 aa, Artificial Sequence
  Artificially Synthesized Peptide
KLIMPARF

SEQ ID NO: 2225 - protein, 9 aa, Artificial Sequence
  Artificially Synthesized Peptide
KLIMPARFY

SEQ ID NO: 2226 - protein, 11 aa, Artificial Sequence
  Artificially Synthesized Peptide
KLPVNRPIDWK

SEQ ID NO: 2227 - protein, 11 aa, Artificial Sequence
  Artificially Synthesized Peptide
KTKRWGYSLNF

SEQ ID NO: 2228 - protein, 9 aa, Artificial Sequence
  Artificially Synthesized Peptide
KVFVLGGCR

SEQ ID NO: 2229 - protein, 10 aa, Artificial Sequence
  Artificially Synthesized Peptide
KVFVLGGCRH

SEQ ID NO: 2230 - protein, 9 aa, Artificial Sequence
  Artificially Synthesized Peptide
KVGNFTGLY

SEQ ID NO: 2231 - protein, 9 aa, Artificial Sequence
  Artificially Synthesized Peptide
LAACFARSR

SEQ ID NO: 2232 - protein, 8 aa, Artificial Sequence
  Artificially Synthesized Peptide
LCLRPVGA

SEQ ID NO: 2233 - protein, 11 aa, Artificial Sequence
  Artificially Synthesized Peptide
LCLRPVGAESR

SEQ ID NO: 2234 - protein, 8 aa, Artificial Sequence
  Artificially Synthesized Peptide
LCQVFADA

SEQ ID NO: 2235 - protein, 8 aa, Artificial Sequence
  Artificially Synthesized Peptide
LDKGIKPY

SEQ ID NO: 2236 - protein, 9 aa, Artificial Sequence
  Artificially Synthesized Peptide
LDKGIKPYY

SEQ ID NO: 2237 - protein, 11 aa, Artificial Sequence
  Artificially Synthesized Peptide
LDPARDVLCLR

SEQ ID NO: 2238 - protein, 10 aa, Artificial Sequence
  Artificially Synthesized Peptide
LDSWWTSLNF

SEQ ID NO: 2239 - protein, 8 aa, Artificial Sequence
  Artificially Synthesized Peptide
LDTASALY

SEQ ID NO: 2240 - protein, 9 aa, Artificial Sequence
  Artificially Synthesized Peptide
LDTASALYR

SEQ ID NO: 2241 - protein, 11 aa, Artificial Sequence
  Artificially Synthesized Peptide
LDTASALYREA

SEQ ID NO: 2242 - protein, 8 aa, Artificial Sequence
  Artificially Synthesized Peptide
LDVSAAFY

SEQ ID NO: 2243 - protein, 9 aa, Artificial Sequence
  Artificially Synthesized Peptide
LDVSAAFYH

SEQ ID NO: 2244 - protein, 10 aa, Artificial Sequence
  Artificially Synthesized Peptide
LFILLLCLIF

SEQ ID NO: 2245 - protein, 8 aa, Artificial Sequence
  Artificially Synthesized Peptide
LGAKSVQH

SEQ ID NO: 2246 - protein, 10 aa, Artificial Sequence
  Artificially Synthesized Peptide
LGCAANWILR

SEQ ID NO: 2247 - protein, 9 aa, Artificial Sequence
  Artificially Synthesized Peptide
LGIHLNPNK

SEQ ID NO: 2248 - protein, 11 aa, Artificial Sequence
  Artificially Synthesized Peptide
LGIHLNPNKTK

SEQ ID NO: 2249 - protein, 9 aa, Artificial Sequence
  Artificially Synthesized Peptide
LGPLLVLQA

SEQ ID NO: 2250 - protein, 11 aa, Artificial Sequence
  Artificially Synthesized Peptide
LGPLLVLQAGF

SEQ ID NO: 2251 - protein, 10 aa, Artificial Sequence
  Artificially Synthesized Peptide
LIFLLVLLDY

SEQ ID NO: 2252 - protein, 8 aa, Artificial Sequence
  Artificially Synthesized Peptide
LIMPARFY

SEQ ID NO: 2253 - protein, 8 aa, Artificial Sequence
  Artificially Synthesized Peptide
LLAACFAR

SEQ ID NO: 2254 - protein, 10 aa, Artificial Sequence
  Artificially Synthesized Peptide
LLAACFARSR

SEQ ID NO: 2255 - protein, 8 aa, Artificial Sequence
  Artificially Synthesized Peptide
LLAQFTSA

SEQ ID NO: 2256 - protein, 9 aa, Artificial Sequence
  Artificially Synthesized Peptide
LLDTASALY

SEQ ID NO: 2257 - protein, 10 aa, Artificial Sequence
  Artificially Synthesized Peptide
LLDTASALYR

SEQ ID NO: 2258 - protein, 11 aa, Artificial Sequence
  Artificially Synthesized Peptide
LLGCAANWILR

SEQ ID NO: 2259 - protein, 8 aa, Artificial Sequence
  Artificially Synthesized Peptide
LLGFAAPF

SEQ ID NO: 2260 - protein, 8 aa, Artificial Sequence
  Artificially Synthesized Peptide
LLGWSPQA

SEQ ID NO: 2261 - protein, 11 aa, Artificial Sequence
  Artificially Synthesized Peptide
LLPIFFCLWVY

SEQ ID NO: 2262 - protein, 9 aa, Artificial Sequence
  Artificially Synthesized Peptide
LLSFLPSDF

SEQ ID NO: 2263 - protein, 10 aa, Artificial Sequence
  Artificially Synthesized Peptide
LLSFLPSDFF

SEQ ID NO: 2264 - protein, 8 aa, Artificial Sequence
  Artificially Synthesized Peptide
LLVLQAGF

SEQ ID NO: 2265 - protein, 9 aa, Artificial Sequence
  Artificially Synthesized Peptide
LLVLQAGFF

SEQ ID NO: 2266 - protein, 9 aa, Artificial Sequence
  Artificially Synthesized Peptide
LLVPFVQWF

SEQ ID NO: 2267 - protein, 11 aa, Artificial Sequence
  Artificially Synthesized Peptide
LLWFHISCLTF

SEQ ID NO: 2268 - protein, 8 aa, Artificial Sequence
  Artificially Synthesized Peptide
LSFLPSDF

SEQ ID NO: 2269 - protein, 9 aa, Artificial Sequence
  Artificially Synthesized Peptide
LSFLPSDFF

SEQ ID NO: 2270 - protein, 8 aa, Artificial Sequence
  Artificially Synthesized Peptide
LSLDVSAA

SEQ ID NO: 2271 - protein, 9 aa, Artificial Sequence
  Artificially Synthesized Peptide
LSLDVSAAF

SEQ ID NO: 2272 - protein, 10 aa, Artificial Sequence
  Artificially Synthesized Peptide
LSLDVSAAFY

SEQ ID NO: 2273 - protein, 12 aa, Artificial Sequence
  Artificially Synthesized Peptide
LSLDVSAAFYII

SEQ ID NO: 2274 - protein, 11 aa, Artificial Sequence
  Artificially Synthesized Peptide
LSLGIHLNPNK

SEQ ID NO: 2275 - protein, 11 aa, Artificial Sequence
  Artificially Synthesized Peptide
LSLLVPFVQWF

SEQ ID NO: 2276 - protein, 10 aa, Artificial Sequence
  Artificially Synthesized Peptide
LSLRGLPVCA

SEQ ID NO: 2277 - protein, 11 aa, Artificial Sequence
  Artificially Synthesized Peptide
LSLRGLPVCAF

SEQ ID NO: 2278 - protein, 9 aa, Artificial Sequence
  Artificially Synthesized Peptide
LSPFLLAQF

SEQ ID NO: 2279 - protein, 8 aa, Artificial Sequence
  Artificially Synthesized Peptide
LSRKYTSF

SEQ ID NO: 2280 - protein, 11 aa, Artificial Sequence
  Artificially Synthesized Peptide
LSTLPETTVVR

SEQ ID NO: 2281 - protein, 9 aa, Artificial Sequence
  Artificially Synthesized Peptide
LSVPNPLGF

SEQ ID NO: 2282 - protein, 10 aa, Artificial Sequence
  Artificially Synthesized Peptide
LSWLSLDVSA

SEQ ID NO: 2283 - protein, 11 aa, Artificial Sequence
  Artificially Synthesized Peptide
LSWLSLDVSAA

SEQ ID NO: 2284 - protein, 9 aa, Artificial Sequence
  Artificially Synthesized Peptide
LSYQIIFRK

SEQ ID NO: 2285 - protein, 11 aa, Artificial Sequence
  Artificially Synthesized Peptide
LTFGRETVLEY

SEQ ID NO: 2286 - protein, 8 aa, Artificial Sequence
  Artificially Synthesized Peptide
LTVNEKRR

SEQ ID NO: 2287 - protein, 8 aa, Artificial Sequence
  Artificially Synthesized Peptide
LVLQAGFF

SEQ ID NO: 2288 - protein, 8 aa, Artificial Sequence
  Artificially Synthesized Peptide
LVPFVQWF

SEQ ID NO: 2289 - protein, 9 aa, Artificial Sequence
  Artificially Synthesized Peptide
LVSFGVWIR

SEQ ID NO: 2290 - protein, 7 aa, Artificial Sequence
  Artificially Synthesized Peptide
LWDFSQF

SEQ ID NO: 2291 - protein, 9 aa, Artificial Sequence
  Artificially Synthesized Peptide
LWDFSQFSR

SEQ ID NO: 2292 - protein, 9 aa, Artificial Sequence
  Artificially Synthesized Peptide
MCLRRFIIF

SEQ ID NO: 2293 - protein, 11 aa, Artificial Sequence
  Artificially Synthesized Peptide
MCLRRFIIFLF

SEQ ID NO: 2294 - protein, 7 aa, Artificial Sequence
  Artificially Synthesized Peptide
MDDWLGA

SEQ ID NO: 2295 - protein, 8 aa, Artificial Sequence
  Artificially Synthesized Peptide
MDDWLGAK

SEQ ID NO: 2296 - protein, 9 aa, Artificial Sequence
  Artificially Synthesized Peptide
MDIDPYKEF

SEQ ID NO: 2297 - protein, 11 aa, Artificial Sequence
  Artificially Synthesized Peptide
MDIDPYKEFGA

SEQ ID NO: 2298 - protein, 8 aa, Artificial Sequence
  Artificially Synthesized Peptide
MGVGLSPF

SEQ ID NO: 2299 - protein, 11 aa, Artificial Sequence
  Artificially Synthesized Peptide
MGVGLSPFLLA

SEQ ID NO: 2300 - protein, 10 aa, Artificial Sequence
  Artificially Synthesized Peptide
MMWYWGPSLY

SEQ ID NO: 2301 - protein, 8 aa, Artificial Sequence
  Artificially Synthesized Peptide
MSTTDLEA

SEQ ID NO: 2302 - protein, 9 aa, Artificial Sequence
  Artificially Synthesized Peptide
MSTTDLEAY

SEQ ID NO: 2303 - protein, 10 aa, Artificial Sequence
  Artificially Synthesized Peptide
MSTTDLEAYF

SEQ ID NO: 2304 - protein, 11 aa, Artificial Sequence
  Artificially Synthesized Peptide
MSTTDLEAYFK

SEQ ID NO: 2305 - protein, 9 aa, Artificial Sequence
  Artificially Synthesized Peptide
NFLLSLGIH

SEQ ID NO: 2306 - protein, 8 aa, Artificial Sequence
  Artificially Synthesized Peptide
NLEDPASR

SEQ ID NO: 2307 - protein, 10 aa, Artificial Sequence
  Artificially Synthesized Peptide
NLNVSIPWTH

SEQ ID NO: 2308 - protein, 11 aa, Artificial Sequence
  Artificially Synthesized Peptide
NLNVSIPWTHK

SEQ ID NO: 2309 - protein, 10 aa, Artificial Sequence
  Artificially Synthesized Peptide
NLSVPNPLGF

SEQ ID NO: 2310 - protein, 11 aa, Artificial Sequence
  Artificially Synthesized Peptide
NLSWLSLDVSA

SEQ ID NO: 2311 - protein, 9 aa, Artificial Sequence
  Artificially Synthesized Peptide
NSQSPTSNH

SEQ ID NO: 2312 - protein, 8 aa, Artificial Sequence
  Artificially Synthesized Peptide
NSVVLSRK

SEQ ID NO: 2313 - protein, 9 aa, Artificial Sequence
  Artificially Synthesized Peptide
NSVVLSRKY

SEQ ID NO: 2314 - protein, 8 aa, Artificial Sequence
  Artificially Synthesized Peptide
NVSIPWTH

SEQ ID NO: 2315 - protein, 9 aa, Artificial Sequence
  Artificially Synthesized Peptide
NVSIPWTHK

SEQ ID NO: 2316 - protein, 9 aa, Artificial Sequence
  Artificially Synthesized Peptide
PADDPSRGR

SEQ ID NO: 2317 - protein, 8 aa, Artificial Sequence
  Artificially Synthesized Peptide
PALMPLYA

SEQ ID NO: 2318 - protein, 10 aa, Artificial Sequence
  Artificially Synthesized Peptide
PAPCNFFTSA

SEQ ID NO: 2319 - protein, 9 aa, Artificial Sequence
  Artificially Synthesized Peptide
PARDVLCLR

SEQ ID NO: 2320 - protein, 9 aa, Artificial Sequence
  Artificially Synthesized Peptide
PARVTGGVF

SEQ ID NO: 2321 - protein, 10 aa, Artificial Sequence
  Artificially Synthesized Peptide
PASTNRQSGR

SEQ ID NO: 2322 - protein, 8 aa, Artificial Sequence
  Artificially Synthesized Peptide
PAYRPPNA

SEQ ID NO: 2323 - protein, 9 aa, Artificial Sequence
  Artificially Synthesized Peptide
PCALRFTSA

SEQ ID NO: 2324 - protein, 10 aa, Artificial Sequence
  Artificially Synthesized Peptide
PCALRFTSAR

SEQ ID NO: 2325 - protein, 8 aa, Artificial Sequence
  Artificially Synthesized Peptide
PCNFFTSA

SEQ ID NO: 2326 - protein, 8 aa, Artificial Sequence
  Artificially Synthesized Peptide
PDHQLDPA

SEQ ID NO: 2327 - protein, 9 aa, Artificial Sequence
  Artificially Synthesized Peptide
PDHQLDPAF

SEQ ID NO: 2328 - protein, 10 aa, Artificial Sequence
  Artificially Synthesized Peptide
PFLLAQFTSA

SEQ ID NO: 2329 - protein, 9 aa, Artificial Sequence
  Artificially Synthesized Peptide
PFTQCGYPA

SEQ ID NO: 2330 - protein, 9 aa, Artificial Sequence
  Artificially Synthesized Peptide
PGYRWMCLR

SEQ ID NO: 2331 - protein, 10 aa, Artificial Sequence
  Artificially Synthesized Peptide
PGYRWMCLRR

SEQ ID NO: 2332 - protein, 11 aa, Artificial Sequence
  Artificially Synthesized Peptide
PGYRWMCLRRF

SEQ ID NO: 2333 - protein, 9 aa, Artificial Sequence
  Artificially Synthesized Peptide
PIDWKVCQR

SEQ ID NO: 2334 - protein, 9 aa, Artificial Sequence
  Artificially Synthesized Peptide
PIFFCLWVY

SEQ ID NO: 2335 - protein, 9 aa, Artificial Sequence
  Artificially Synthesized Peptide
PIHTAELLA

SEQ ID NO: 2336 - protein, 10 aa, Artificial Sequence
  Artificially Synthesized Peptide
PIHTAELLAA

SEQ ID NO: 2337 - protein, 8 aa, Artificial Sequence
  Artificially Synthesized Peptide
PIILGFRK

SEQ ID NO: 2338 - protein, 8 aa, Artificial Sequence
  Artificially Synthesized Peptide
PIPSSWAF

SEQ ID NO: 2339 - protein, 9 aa, Artificial Sequence
  Artificially Synthesized Peptide
PIPSSWAFA

SEQ ID NO: 2340 - protein, 9 aa, Artificial Sequence
  Artificially Synthesized Peptide
PLDKGIKPY

SEQ ID NO: 2341 - protein, 10 aa, Artificial Sequence
  Artificially Synthesized Peptide
PLDKGIKPYY

SEQ ID NO: 2342 - protein, 8 aa, Artificial Sequence
  Artificially Synthesized Peptide
PLEEELPR

SEQ ID NO: 2343 - protein, 10 aa, Artificial Sequence
  Artificially Synthesized Peptide
PLEEELPRLA

SEQ ID NO: 2344 - protein, 8 aa, Artificial Sequence
  Artificially Synthesized Peptide
PLGFFPDH

SEQ ID NO: 2345 - protein, 9 aa, Artificial Sequence
  Artificially Synthesized Peptide
PLHPAAMPH

SEQ ID NO: 2346 - protein, 9 aa, Artificial Sequence
  Artificially Synthesized Peptide
PLLVLQAGF

SEQ ID NO: 2347 - protein, 10 aa, Artificial Sequence
  Artificially Synthesized Peptide
PLLVLQAGFF

SEQ ID NO: 2348 - protein, 11 aa, Artificial Sequence
  Artificially Synthesized Peptide
PLPIHTAELLA

SEQ ID NO: 2349 - protein, 8 aa, Artificial Sequence
  Artificially Synthesized Peptide
PLSYQHFR

SEQ ID NO: 2350 - protein, 9 aa, Artificial Sequence
  Artificially Synthesized Peptide
PLSYQHFRK

SEQ ID NO: 2351 - protein, 8 aa, Artificial Sequence
  Artificially Synthesized Peptide
PLTVNEKR

SEQ ID NO: 2352 - protein, 9 aa, Artificial Sequence
  Artificially Synthesized Peptide
PLTVNEKRR

SEQ ID NO: 2353 - protein, 9 aa, Artificial Sequence
  Artificially Synthesized Peptide
PMGVGLSPF

SEQ ID NO: 2354 - protein, 9 aa, Artificial Sequence
  Artificially Synthesized Peptide
PTTGRTSLY

SEQ ID NO: 2355 - protein, 10 aa, Artificial Sequence
  Artificially Synthesized Peptide
PTTGRTSLYA

SEQ ID NO: 2356 - protein, 8 aa, Artificial Sequence
  Artificially Synthesized Peptide
PVCAFSSA

SEQ ID NO: 2357 - protein, 9 aa, Artificial Sequence
  Artificially Synthesized Peptide
PVGAESRGR

SEQ ID NO: 2358 - protein, 9 aa, Artificial Sequence
  Artificially Synthesized Peptide
PVNRPIDWK

SEQ ID NO: 2359 - protein, 9 aa, Artificial Sequence
  Artificially Synthesized Peptide
QAFTFSPTY

SEQ ID NO: 2360 - protein, 10 aa, Artificial Sequence
  Artificially Synthesized Peptide
QAFTFSPTYK

SEQ ID NO: 2361 - protein, 11 aa, Artificial Sequence
  Artificially Synthesized Peptide
QAFTFSPTYKA

SEQ ID NO: 2362 - protein, 9 aa, Artificial Sequence
  Artificially Synthesized Peptide
QAGFFLLTR

SEQ ID NO: 2363 - protein, 10 aa, Artificial Sequence
  Artificially Synthesized Peptide
QAMQWNSTTF

SEQ ID NO: 2364 - protein, 11 aa, Artificial Sequence
  Artificially Synthesized Peptide
QAMQWNSTTFH

SEQ ID NO: 2365 - protein, 11 aa, Artificial Sequence
  Artificially Synthesized Peptide
QCGYPALMPLY

SEQ ID NO: 2366 - protein, 11 aa, Artificial Sequence
  Artificially Synthesized Peptide
QFTSAICSVVR

SEQ ID NO: 2367 - protein, 11 aa, Artificial Sequence
  Artificially Synthesized Peptide
QSPRRRRSQSR

SEQ ID NO: 2368 - protein, 8 aa, Artificial Sequence
  Artificially Synthesized Peptide
QSSGILSR

SEQ ID NO: 2369 - protein, 8 aa, Artificial Sequence
  Artificially Synthesized Peptide
RAFPHCLA

SEQ ID NO: 2370 - protein, 9 aa, Artificial Sequence
  Artificially Synthesized Peptide
RAFPHCLAF

SEQ ID NO: 2371 - protein, 11 aa, Artificial Sequence
  Artificially Synthesized Peptide
RAFPHCIAFSY

SEQ ID NO: 2372 - protein, 9 aa, Artificial Sequence
  Artificially Synthesized Peptide
RDLLDTASA

SEQ ID NO: 2373 - protein, 11 aa, Artificial Sequence
  Artificially Synthesized Peptide
RDLLDTASALY

SEQ ID NO: 2374 - protein, 11 aa, Artificial Sequence
  Artificially Synthesized Peptide
RDVLCLRPVGA

SEQ ID NO: 2375 - protein, 11 aa, Artificial Sequence
  Artificially Synthesized Peptide
RFSWLSLLVPF

SEQ ID NO: 2376 - protein, 8 aa, Artificial Sequence
  Artificially Synthesized Peptide
RGLPVCAF

SEQ ID NO: 2377 - protein, 11 aa, Artificial Sequence
  Artificially Synthesized Peptide
RGLPVCAFSSA

SEQ ID NO: 2378 - protein, 8 aa, Artificial Sequence
  Artificially Synthesized Peptide
RGRSPRRR

SEQ ID NO: 2379 - protein, 11 aa, Artificial Sequence
  Artificially Synthesized Peptide
RGTSFVYVPSA

SEQ ID NO: 2380 - protein, 7 aa, Artificial Sequence
  Artificially Synthesized Peptide
RNGLLGF

SEQ ID NO: 2381 - protein, 9 aa, Artificial Sequence
  Artificially Synthesized Peptide
RIVGLLGFA

SEQ ID NO: 2382 - protein, 10 aa, Artificial Sequence
  Artificially Synthesized Peptide
RIVGLLGFAA

SEQ ID NO: 2383 - protein, 8 aa, Artificial Sequence
  Artificially Synthesized Peptide
RLKLIMPA

SEQ ID NO: 2384 - protein, 9 aa, Artificial Sequence
  Artificially Synthesized Peptide
RLKLIMPAR

SEQ ID NO: 2385 - protein, 10 aa, Artificial Sequence
  Artificially Synthesized Peptide
RLKLIMPARF

SEQ ID NO: 2386 - protein, 11 aa, Artificial Sequence
  Artificially Synthesized Peptide
RLKLIMPARFY

SEQ ID NO: 2387 - protein, 11 aa, Artificial Sequence
  Artificially Synthesized Peptide
RLKVFVLGGCR

SEQ ID NO: 2388 - protein, 9 aa, Artificial Sequence
  Artificially Synthesized Peptide
RLVVDFSQF

SEQ ID NO: 2389 - protein, 11 aa, Artificial Sequence
  Artificially Synthesized Peptide
RLVVDFSQFSR

SEQ ID NO: 2390 - protein, 11 aa, Artificial Sequence
  Artificially Synthesized Peptide
RSPRRRTPSPR

SEQ ID NO: 2391 - protein, 8 aa, Artificial Sequence
  Artificially Synthesized Peptide
RSQSPRRR

SEQ ID NO: 2392 - protein, 9 aa, Artificial Sequence
  Artificially Synthesized Peptide
RSQSPRRRR

SEQ ID NO: 2393 - protein, 11 aa, Artificial Sequence
  Artificially Synthesized Peptide
RTPARVTGGVF

SEQ ID NO: 2394 - protein, 11 aa, Artificial Sequence
  Artificially Synthesized Peptide
RTPPAYRPPNA

SEQ ID NO: 2395 - protein, 8 aa, Artificial Sequence
  Artificially Synthesized Peptide
RTPSPRRR

SEQ ID NO: 2396 - protein, 9 aa, Artificial Sequence
  Artificially Synthesized Peptide
RTPSPRRRR

SEQ ID NO: 2397 - protein, 9 aa, Artificial Sequence
  Artificially Synthesized Peptide
RVHFASPLH

SEQ ID NO: 2398 - protein, 11 aa, Artificial Sequence
  Artificially Synthesized Peptide
RVHFASPLHVA

SEQ ID NO: 2399 - protein, 11 aa, Artificial Sequence
  Artificially Synthesized Peptide
RVTGGVFIVDK

SEQ ID NO: 2400 - protein, 8 aa, Artificial Sequence
  Artificially Synthesized Peptide
SAGPCALR

SEQ ID NO: 2401 - protein, 9 aa, Artificial Sequence
  Artificially Synthesized Peptide
SAGPCALRF

SEQ ID NO: 2402 - protein, 8 aa, Artificial Sequence
  Artificially Synthesized Peptide
SAICSVVR

SEQ ID NO: 2403 - protein, 9 aa, Artificial Sequence
  Artificially Synthesized Peptide
SAICSVVRR

SEQ ID NO: 2404 - protein, 9 aa, Artificial Sequence
  Artificially Synthesized Peptide
SAICSWRRA

SEQ ID NO: 2405 - protein, 10 aa, Artificial Sequence
  Artificially Synthesized Peptide
SAICSWRRAF

SEQ ID NO: 2406 - protein, 11 aa, Artificial Sequence
  Artificially Synthesized Peptide
SALNPADDPSR

SEQ ID NO: 2407 - protein, 9 aa, Artificial Sequence
  Artificially Synthesized Peptide
SASFCGSPY

SEQ ID NO: 2408 - protein, 11 aa, Artificial Sequence
  Artificially Synthesized Peptide
SFGVWIRTPPA

SEQ ID NO: 2409 - protein, 8 aa, Artificial Sequence
  Artificially Synthesized Peptide
SFLPSDFF

SEQ ID NO: 2410 - protein, 9 aa, Artificial Sequence
  Artificially Synthesized Peptide
SFPWLIGCA

SEQ ID NO: 2411 - protein, 10 aa, Artificial Sequence
  Artificially Synthesized Peptide
SFPWLLGCAA

SEQ ID NO: 2412 - protein, 7 aa, Artificial Sequence
  Artificially Synthesized Peptide
SFVWPSA

SEQ ID NO: 2413 - protein, 11 aa, Artificial Sequence
  Artificially Synthesized Peptide
SIPWTHKVGNF

SEQ ID NO: 2414 - protein, 11 aa, Artificial Sequence
  Artificially Synthesized Peptide
SLDSWWTSINF

SEQ ID NO: 2415 - protein, 8 aa, Artificial Sequence
  Artificially Synthesized Peptide
SLDVSAAF

SEQ ID NO: 2416 - protein, 9 aa, Artificial Sequence
  Artificially Synthesized Peptide
SIQVSAAFY

SEQ ID NO: 2417 - protein, 10 aa, Artificial Sequence
  Artificially Synthesized Peptide
SLDVSAAFYH

SEQ ID NO: 2418 - protein, 10 aa, Artificial Sequence
  Artificially Synthesized Peptide
SIGIHLNPNK

SEQ ID NO: 2419 - protein, 10 aa, Artificial Sequence
  Artificially Synthesized Peptide
SLLVPFVQWF

SEQ ID NO: 2420 - protein, 9 aa, Artificial Sequence
  Artificially Synthesized Peptide
SLRGLPVCA

SEQ ID NO: 2421 - protein, 10 aa, Artificial Sequence
  Artificially Synthesized Peptide
SLRGLPVCAF

SEQ ID NO: 2422 - protein, 9 aa, Artificial Sequence
  Artificially Synthesized Peptide
SSAGPCALR

SEQ ID NO: 2423 - protein, 10 aa, Artificial Sequence
  Artificially Synthesized Peptide
SSAGPCALRF

SEQ ID NO: 2424 - protein, 10 aa, Artificial Sequence
  Artificially Synthesized Peptide
STIPETTVVR

SEQ ID NO: 2425 - protein, 10 aa, Artificial Sequence
  Artificially Synthesized Peptide
STLPETTWRR

SEQ ID NO: 2426 - protein, 8 aa, Artificial Sequence
  Artificially Synthesized Peptide
STNRQSGR

SEQ ID NO: 2427 - protein, 8 aa, Artificial Sequence
  Artificially Synthesized Peptide
STTDLEAY

SEQ ID NO: 2428 - protein, 9 aa, Artificial Sequence
  Artificially Synthesized Peptide
STTDLEAYF

SEQ ID NO: 2429 - protein, 10 aa, Artificial Sequence
  Artificially Synthesized Peptide
STTDLEAYFK

SEQ ID NO: 2430 - protein, 8 aa, Artificial Sequence
  Artificially Synthesized Peptide
SVPNPLGF

SEQ ID NO: 2431 - protein, 8 aa, Artificial Sequence
  Artificially Synthesized Peptide
SVVLSRKY

SEQ ID NO: 2432 - protein, 11 aa, Artificial Sequence
  Artificially Synthesized Peptide
SVVLSRKYTSF

SEQ ID NO: 2433 - protein, 9 aa, Artificial Sequence
  Artificially Synthesized Peptide
SVVRRAFPH

SEQ ID NO: 2434 - protein, 9 aa, Artificial Sequence
  Artificially Synthesized Peptide
TAELLAACF

SEQ ID NO: 2435 - protein, 10 aa, Artificial Sequence
  Artificially Synthesized Peptide
TAELLAACFA

SEQ ID NO: 2436 - protein, 11 aa, Artificial Sequence
  Artificially Synthesized Peptide
TAELLAACFAR

SEQ ID NO: 2437 - protein, 9 aa, Artificial Sequence
  Artificially Synthesized Peptide
TASALYREA

SEQ ID NO: 2438 - protein, 10 aa, Artificial Sequence
  Artificially Synthesized Peptide
TCIPIPSSWA

SEQ ID NO: 2439 - protein, 11 aa, Artificial Sequence
  Artificially Synthesized Peptide
TCIPIPSSWAF

SEQ ID NO: 2440 - protein, 8 aa, Artificial Sequence
  Artificially Synthesized Peptide
TDLEAYFK

SEQ ID NO: 2441 - protein, 9 aa, Artificial Sequence
  Artificially Synthesized Peptide
TDNSVVLSR

SEQ ID NO: 2442 - protein, 10 aa, Artificial Sequence
  Artificially Synthesized Peptide
TDNSVVLSRK

SEQ ID NO: 2443 - protein, 11 aa, Artificial Sequence
  Artificially Synthesized Peptide
TDNSVVLSRKY

SEQ ID NO: 2444 - protein, 10 aa, Artificial Sequence
  Artificially Synthesized Peptide
TFGRETVLEY

SEQ ID NO: 2445 - protein, 8 aa, Artificial Sequence
  Artificially Synthesized Peptide
TFSPTYKA

SEQ ID NO: 2446 - protein, 9 aa, Artificial Sequence
  Artificially Synthesized Peptide
TFSPTYKAF

SEQ ID NO: 2447 - protein, 9 aa, Artificial Sequence
  Artificially Synthesized Peptide
TGGVFLVQK

SEQ ID NO: 2448 - protein, 8 aa, Artificial Sequence
  Artificially Synthesized Peptide
TGRTSLYA

SEQ ID NO: 2449 - protein, 9 aa, Artificial Sequence
  Artificially Synthesized Peptide
TLPETTVVR

SEQ ID NO: 2450 - protein, 10 aa, Artificial Sequence
  Artificially Synthesized Peptide
TLPETTVVRR

SEQ ID NO: 2451 - protein, 11 aa, Artificial Sequence
  Artificially Synthesized Peptide
TLPETTVVRRR

SEQ ID NO: 2452 - protein, 9 aa, Artificial Sequence
  Artificially Synthesized Peptide
TLWKAGILY

SEQ ID NO: 2453 - protein, 10 aa, Artificial Sequence
  Artificially Synthesized Peptide
TLWKAGILYK

SEQ ID NO: 2454 - protein, 11 aa, Artificial Sequence
  Artificially Synthesized Peptide
TLWKAGILYKR

SEQ ID NO: 2455 - protein, 9 aa, Artificial Sequence
  Artificially Synthesized Peptide
TSAICSVVR

SEQ ID NO: 2456 - protein, 10 aa, Artificial Sequence
  Artificially Synthesized Peptide
TSAICSVVRR

SEQ ID NO: 2457 - protein, 11 aa, Artificial Sequence
  Artificially Synthesized Peptide
TSAICSVVRRA

SEQ ID NO: 2458 - protein, 10 aa, Artificial Sequence
  Artificially Synthesized Peptide
TSFPWLLGCA

SEQ ID NO: 2459 - protein, 11 aa, Artificial Sequence
  Artificially Synthesized Peptide
TSFPWLLGCAA

SEQ ID NO: 2460 - protein, 9 aa, Artificial Sequence
  Artificially Synthesized Peptide
TSFVYVPSA

SEQ ID NO: 2461 - protein, 8 aa, Artificial Sequence
  Artificially Synthesized Peptide
TTDLEAYF

SEQ ID NO: 2462 - protein, 9 aa, Artificial Sequence
  Artificially Synthesized Peptide
TTDLEAYFK

SEQ ID NO: 2463 - protein, 8 aa, Artificial Sequence
  Artificially Synthesized Peptide
TTGRTSLY

SEQ ID NO: 2464 - protein, 9 aa, Artificial Sequence
  Artificially Synthesized Peptide
TTGRTSLYA

SEQ ID NO: 2465 - protein, 8 aa, Artificial Sequence
  Artificially Synthesized Peptide
TTSTGPCK

SEQ ID NO: 2466 - protein, 9 aa, Artificial Sequence
  Artificially Synthesized Peptide
TTVVRRRGR

SEQ ID NO: 2467 - protein, 8 aa, Artificial Sequence
  Artificially Synthesized Peptide
TVVRRRGR

SEQ ID NO: 2468 - protein, 11 aa, Artificial Sequence
  Artificially Synthesized Peptide
TVVRRRGRSPR

SEQ ID NO: 2469 - protein, 11 aa, Artificial Sequence
  Artificially Synthesized Peptide
VCAFSSAGPCA

SEQ ID NO: 2470 - protein, 10 aa, Artificial Sequence
  Artificially Synthesized Peptide
VCQRNGLLGF

SEQ ID NO: 2471 - protein, 8 aa, Artificial Sequence
  Artificially Synthesized Peptide
VDFSQFSR

SEQ ID NO: 2472 - protein, 9 aa, Artificial Sequence
  Artificially Synthesized Peptide
VFLVDKNPH

SEQ ID NO: 2473 - protein, 8 aa, Artificial Sequence
  Artificially Synthesized Peptide
VFVLGGCR

SEQ ID NO: 2474 - protein, 9 aa, Artificial Sequence
  Artificially Synthesized Peptide
VFVLGGCRH

SEQ ID NO: 2475 - protein, 10 aa, Artificial Sequence
  Artificially Synthesized Peptide
VFVLGGCRHK

SEQ ID NO: 2476 - protein, 8 aa, Artificial Sequence
  Artificially Synthesized Peptide
VGAESRGR

SEQ ID NO: 2477 - protein, 8 aa, Artificial Sequence
  Artificially Synthesized Peptide
VGLLGFAA

SEQ ID NO: 2478 - protein, 10 aa, Artificial Sequence
  Artificially Synthesized Peptide
VGLLGFAAPF

SEQ ID NO: 2479 - protein, 9 aa, Artificial Sequence
  Artificially Synthesized Peptide
VGLSPFLLA

SEQ ID NO: 2480 - protein, 11 aa, Artificial Sequence
  Artificially Synthesized Peptide
VGLSPFLLAQF

SEQ ID NO: 2481 - protein, 8 aa, Artificial Sequence
  Artificially Synthesized Peptide
VGNFTGLY

SEQ ID NO: 2482 - protein, 9 aa, Artificial Sequence
  Artificially Synthesized Peptide
VGPLTVNEK

SEQ ID NO: 2483 - protein, 10 aa, Artificial Sequence
  Artificially Synthesized Peptide
VGPLTVNEKR

SEQ ID NO: 2484 - protein, 11 aa, Artificial Sequence
  Artificially Synthesized Peptide
VGPLTVNEKRR

SEQ ID NO: 2485 - protein, 9 aa, Artificial Sequence
  Artificially Synthesized Peptide
VLCLRPVGA

SEQ ID NO: 2486 - protein, 9 aa, Artificial Sequence
  Artificially Synthesized Peptide
VLGAKSVQH

SEQ ID NO: 2487 - protein, 8 aa, Artificial Sequence
  Artificially Synthesized Peptide
VLGGCRHK

SEQ ID NO: 2488 - protein, 11 aa, Artificial Sequence
  Artificially Synthesized Peptide
VLQAGFFLLTR

SEQ ID NO: 2489 - protein, 9 aa, Artificial Sequence
  Artificially Synthesized Peptide
VLSRKYTSF

SEQ ID NO: 2490 - protein, 8 aa, Artificial Sequence
  Artificially Synthesized Peptide
VSFGVWIR

SEQ ID NO: 2491 - protein, 8 aa, Artificial Sequence
  Artificially Synthesized Peptide
VSIPWTHK

SEQ ID NO: 2492 - protein, 10 aa, Artificial Sequence
  Artificially Synthesized Peptide
VTGGVFLVDK

SEQ ID NO: 2493 - protein, 9 aa, Artificial Sequence
  Artificially Synthesized Peptide
VVDFSQFSR

SEQ ID NO: 2494 - protein, 10 aa, Artificial Sequence
  Artificially Synthesized Peptide
VVLGAKSVQH

SEQ ID NO: 2495 - protein, 10 aa, Artificial Sequence
  Artificially Synthesized Peptide
VVLSRKYTSF

SEQ ID NO: 2496 - protein, 8 aa, Artificial Sequence
  Artificially Synthesized Peptide
VVRRAFPH

SEQ ID NO: 2497 - protein, 11 aa, Artificial Sequence
  Artificially Synthesized Peptide
VVRRAFPHCLA

SEQ ID NO: 2498 - protein, 10 aa, Artificial Sequence
  Artificially Synthesized Peptide
VVRRRGRSPR

SEQ ID NO: 2499 - protein, 11 aa, Artificial Sequence
  Artificially Synthesized Peptide
VVRRRGRSPRR

SEQ ID NO: 2500 - protein, 9 aa, Artificial Sequence
  Artificially Synthesized Peptide
WFHISCLTF

SEQ ID NO: 2501 - protein, 11 aa, Artificial Sequence
  Artificially Synthesized Peptide
WFHISCLTFGR

SEQ ID NO: 2502 - protein, 8 aa, Artificial Sequence
  Artificially Synthesized Peptide
WGMDIDPY

SEQ ID NO: 2503 - protein, 9 aa, Artificial Sequence
  Artificially Synthesized Peptide
WGMDIDPYK

SEQ ID NO: 2504 - protein, 11 aa, Artificial Sequence
  Artificially Synthesized Peptide
WGMDIDPYKEF

SEQ ID NO: 2505 - protein, 10 aa, Artificial Sequence
  Artificially Synthesized Peptide
WGYSLNFMGY

SEQ ID NO: 2506 - protein, 8 aa, Artificial Sequence
  Artificially Synthesized Peptide
WILRGTSF

SEQ ID NO: 2507 - protein, 10 aa, Artificial Sequence
  Artificially Synthesized Peptide
WILRGTSFVY

SEQ ID NO: 2508 - protein, 8 aa, Artificial Sequence
  Artificially Synthesized Peptide
WIRTPPAY

SEQ ID NO: 2509 - protein, 9 aa, Artificial Sequence
  Artificially Synthesized Peptide
WIRTPPAYR

SEQ ID NO: 2510 - protein, 8 aa, Artificial Sequence
  Artificially Synthesized Peptide
WLQFRNSK

SEQ ID NO: 2511 - protein, 8 aa, Artificial Sequence
  Artificially Synthesized Peptide
WLSLDVSA

SEQ ID NO: 2512 - protein, 9 aa, Artificial Sequence
  Artificially Synthesized Peptide
WLSLDVSAA

SEQ ID NO: 2513 - protein, 10 aa, Artificial Sequence
  Artificially Synthesized Peptide
WLSLDVSAAF

SEQ ID NO: 2514 - protein, 11 aa, Artificial Sequence
  Artificially Synthesized Peptide
WLSLDVSAAFY

SEQ ID NO: 2515 - protein, 8 aa, Artificial Sequence
  Artificially Synthesized Peptide
WLSLLVPF

SEQ ID NO: 2516 - protein, 10 aa, Artificial Sequence
  Artificially Synthesized Peptide
WLWGMDIDPY

SEQ ID NO: 2517 - protein, 11 aa, Artificial Sequence
  Artificially Synthesized Peptide
WLWGMDIDPYK

SEQ ID NO: 2518 - protein, 10 aa, Artificial Sequence
  Artificially Synthesized Peptide
WMCLRRFIIF

SEQ ID NO: 2519 - protein, 11 aa, Artificial Sequence
  Artificially Synthesized Peptide
WMMWYWGPSLY

SEQ ID NO: 2520 - protein, 8 aa, Artificial Sequence
  Artificially Synthesized Peptide
WTHKVGNF

SEQ ID NO: 2521 - protein, 8 aa, Artificial Sequence
  Artificially Synthesized Peptide
YLHTLWKA

SEQ ID NO: 2522 - protein, 9 aa, Artificial Sequence
  Artificially Synthesized Peptide
YLPLDKGIK

SEQ ID NO: 2523 - protein, 11 aa, Artificial Sequence
  Artificially Synthesized Peptide
YLPLDKGIKPY

SEQ ID NO: 2524 - protein, 10 aa, Artificial Sequence
  Artificially Synthesized Peptide
YLVSFGVWIR

SEQ ID NO: 2525 - protein, 9 aa, Artificial Sequence
  Artificially Synthesized Peptide
YMDDVVLGA

SEQ ID NO: 2526 - protein, 9 aa, Artificial Sequence
  Artificially Synthesized Peptide
YMDDWLGAK

SEQ ID NO: 2527 - protein, 9 aa, Artificial Sequence
  Artificially Synthesized Peptide
YSHPIILGF

SEQ ID NO: 2528 - protein, 10 aa, Artificial Sequence
  Artificially Synthesized Peptide
YSHPIILGFR

SEQ ID NO: 2529 - protein, 12 aa, Artificial Sequence
  Artificially Synthesized Peptide
YSHIPIILGFRK

SEQ ID NO: 2530 - protein, 8 aa, Artificial Sequence
  Artificially Synthesized Peptide
YSLNFMGY

SEQ ID NO: 2531 - protein, 11 aa, Artificial Sequence
  Artificially Synthesized Peptide
YTSFPWLLGCA

SEQ ID NO: 2532 - protein, 9 aa, Artificial Sequence
  Artificially Synthesized Peptide
YVPSALNPA

SEQ ID NO: 2533 - protein, 10 aa, Artificial Sequence
  Artificially Synthesized Peptide
DNSVVLSRKY

SEQ ID NO: 2534 - protein, 8 aa, Artificial Sequence
  Artificially Synthesized Peptide
DTASALYR

SEQ ID NO: 2535 - protein, 8 aa, Artificial Sequence
  Artificially Synthesized Peptide
DVSAAFYH

SEQ ID NO: 2536 - protein, 11 aa, Artificial Sequence
  Artificially Synthesized Peptide
DVVLGAKSVQH

SEQ ID NO: 2537 - protein, 11 aa, Artificial Sequence
  Artificially Synthesized Peptide
EAGPLEEELPR

SEQ ID NO: 2538 - protein, 8 aa, Artificial Sequence
  Artificially Synthesized Peptide
EALESPEH

SEQ ID NO: 2539 - protein, 9 aa, Artificial Sequence
  Artificially Synthesized Peptide
ELLAACFAR

SEQ ID NO: 2540 - protein, 11 aa, Artificial Sequence
  Artificially Synthesized Peptide
ELLAACFARSR

SEQ ID NO: 2541 - protein, 9 aa, Artificial Sequence
  Artificially Synthesized Peptide
ESPEHCSPH

SEQ ID NO: 2542 - protein, 10 aa, Artificial Sequence
  Artificially Synthesized Peptide
ESPEHCSPHH

SEQ ID NO: 2543 - protein, 8 aa, Artificial Sequence
  Artificially Synthesized Peptide
ETTVVRRR

SEQ ID NO: 2544 - protein, 10 aa, Artificial Sequence
  Artificially Synthesized Peptide
ETTVVRRRGR

SEQ ID NO: 2545 - protein, 10 aa, Artificial Sequence
  Artificially Synthesized Peptide
FAAPFTQCGY

SEQ ID NO: 2546 - protein, 10 aa, Artificial Sequence
  Artificially Synthesized Peptide
FASPLHVAWR

SEQ ID NO: 2547 - protein, 9 aa, Artificial Sequence
  Artificially Synthesized Peptide
FGRETVLEY

SEQ ID NO: 2548 - protein, 10 aa, Artificial Sequence
  Artificially Synthesized Peptide
FGVEPSGSGH

SEQ ID NO: 2549 - protein, 11 aa, Artificial Sequence
  Artificially Synthesized Peptide
FGVWIRTPPAY

SEQ ID NO: 2550 - protein, 8 aa, Artificial Sequence
  Artificially Synthesized Peptide
FLLSLGIH

SEQ ID NO: 2551 - protein, 8 aa, Artificial Sequence
  Artificially Synthesized Peptide
FLLVLLDY

SEQ ID NO: 2552 - protein, 8 aa, Artificial Sequence
  Artificially Synthesized Peptide
FLVDKVPH

SEQ ID NO: 2553 - protein, 10 aa, Artificial Sequence
  Artificially Synthesized Peptide
FSSAGPCALR

SEQ ID NO: 2554 - protein, 8 aa, Artificial Sequence
  Artificially Synthesized Peptide
FTFSPTYK

SEQ ID NO: 2555 - protein, 10 aa, Artificial Sequence
  Artificially Synthesized Peptide
FTSAICSVVR

SEQ ID NO: 2556 - protein, 11 aa, Artificial Sequence
  Artificially Synthesized Peptide
FTSAICSVVRR

SEQ ID NO: 2557 - protein, 8 aa, Artificial Sequence
  Artificially Synthesized Peptide
FVLGGCRH

SEQ ID NO: 2558 - protein, 9 aa, Artificial Sequence
  Artificially Synthesized Peptide
FVLGGCRHK

SEQ ID NO: 2559 - protein, 9 aa, Artificial Sequence
  Artificially Synthesized Peptide
GCAANWILR

SEQ ID NO: 2560 - protein, 11 aa, Artificial Sequence
  Artificially Synthesized Peptide
GFAAPFTQCGY

SEQ ID NO: 2561 - protein, 8 aa, Artificial Sequence
  Artificially Synthesized Peptide
GGVFLVDK

SEQ ID NO: 2562 - protein, 11 aa, Artificial Sequence
  Artificially Synthesized Peptide
GGVFLVDKNPH

SEQ ID NO: 2563 - protein, 8 aa, Artificial Sequence
  Artificially Synthesized Peptide
GIHLNPNK

SEQ ID NO: 2564 - protein, 10 aa, Artificial Sequence
  Artificially Synthesized Peptide
GIHLNPNKTK

SEQ ID NO: 2565 - protein, 11 aa, Artificial Sequence
  Artificially Synthesized Peptide
GIHLNPNKTKR

SEQ ID NO: 2566 - protein, 8 aa, Artificial Sequence
  Artificially Synthesized Peptide
GMDIDPYK

SEQ ID NO: 2567 - protein, 11 aa, Artificial Sequence
  Artificially Synthesized Peptide
GNLNVSIPWTH

SEQ ID NO: 2568 - protein, 10 aa, Artificial Sequence
  Artificially Synthesized Peptide
GTDNSVVLSR

SEQ ID NO: 2569 - protein, 11 aa, Artificial Sequence
  Artificially Synthesized Peptide
GTDNSVVLSRK

SEQ ID NO: 2570 - protein, 9 aa, Artificial Sequence
  Artificially Synthesized Peptide
GVEPSGSGH

SEQ ID NO: 2571 - protein, 10 aa, Artificial Sequence
  Artificially Synthesized Peptide
GVFLVDKNPH

SEQ ID NO: 2572 - protein, 10 aa, Artificial Sequence
  Artificially Synthesized Peptide
GVWIRTPPAY

SEQ ID NO: 2573 - protein, 11 aa, Artificial Sequence
  Artificially Synthesized Peptide
GVWIRTPPAYR

SEQ ID NO: 2574 - protein, 10 aa, Artificial Sequence
  Artificially Synthesized Peptide
HCSPHHTALR

SEQ ID NO: 2575 - protein, 11 aa, Artificial Sequence
  Artificially Synthesized Peptide
HFASPLHVAWR

SEQ ID NO: 2576 - protein, 8 aa, Artificial Sequence
  Artificially Synthesized Peptide
HGAHLSLR

SEQ ID NO: 2577 - protein, 9 aa, Artificial Sequence
  Artificially Synthesized Peptide
HISCLTFGR

SEQ ID NO: 2578 - protein, 8 aa, Artificial Sequence
  Artificially Synthesized Peptide
HLNPNKTK

SEQ ID NO: 2579 - protein, 9 aa, Artificial Sequence
  Artificially Synthesized Peptide
HLNPNKTKR

SEQ ID NO: 2580 - protein, 10 aa, Artificial Sequence
  Artificially Synthesized Peptide
HTLWKAGILY

SEQ ID NO: 2581 - protein, 11 aa, Artificial Sequence
  Artificially Synthesized Peptide
HTLWKAGILYK

SEQ ID NO: 2582 - protein, 11 aa, Artificial Sequence
  Artificially Synthesized Peptide
ICSVVRRAFPH

SEQ ID NO: 2583 - protein, 8 aa, Artificial Sequence
  Artificially Synthesized Peptide
IDWKVCQR

SEQ ID NO: 2584 - protein, 8 aa, Artificial Sequence
  Artificially Synthesized Peptide
IFFCLWVY

SEQ ID NO: 2585 - protein, 9 aa, Artificial Sequence
  Artificially Synthesized Peptide
IFLLVLLDY

SEQ ID NO: 2586 - protein, 11 aa, Artificial Sequence
  Artificially Synthesized Peptide
IGTDNSVVLSR

SEQ ID NO: 2587 - protein, 9 aa, Artificial Sequence
  Artificially Synthesized Peptide
ILRGTSFVY

SEQ ID NO: 2588 - protein, 8 aa, Artificial Sequence
  Artificially Synthesized Peptide
ISCLTFGR

SEQ ID NO: 2589 - protein, 8 aa, Artificial Sequence
  Artificially Synthesized Peptide
KAGILYKR

SEQ ID NO: 2590 - protein, 9 aa, Artificial Sequence
  Artificially Synthesized Peptide
KLIMPARFY

SEQ ID NO: 2591 - protein, 11 aa, Artificial Sequence
  Artificially Synthesized Peptide
KLPVNRPIDWK

SEQ ID NO: 2592 - protein, 9 aa, Artificial Sequence
  Artificially Synthesized Peptide
KVFVLGGCR

SEQ ID NO: 2593 - protein, 10 aa, Artificial Sequence
  Artificially Synthesized Peptide
KVFVLGGCRH

SEQ ID NO: 2594 - protein, 9 aa, Artificial Sequence
  Artificially Synthesized Peptide
KVGNFTGLY

SEQ ID NO: 2595 - protein, 9 aa, Artificial Sequence
  Artificially Synthesized Peptide
LAACFARSR

SEQ ID NO: 2596 - protein, 11 aa, Artificial Sequence
  Artificially Synthesized Peptide
LCLRPVGAESR

SEQ ID NO: 2597 - protein, 8 aa, Artificial Sequence
  Artificially Synthesized Peptide
LDKGIKPY

SEQ ID NO: 2598 - protein, 9 aa, Artificial Sequence
  Artificially Synthesized Peptide
LDKGIKPYY

SEQ ID NO: 2599 - protein, 11 aa, Artificial Sequence
  Artificially Synthesized Peptide
LDPARDVLCLR

SEQ ID NO: 2600 - protein, 8 aa, Artificial Sequence
  Artificially Synthesized Peptide
LDTASALY

SEQ ID NO: 2601 - protein, 9 aa, Artificial Sequence
  Artificially Synthesized Peptide
LDTASALYR

SEQ ID NO: 2602 - protein, 8 aa, Artificial Sequence
  Artificially Synthesized Peptide
LDVSAAFY

SEQ ID NO: 2603 - protein, 9 aa, Artificial Sequence
  Artificially Synthesized Peptide
LDVSAAFYH

SEQ ID NO: 2604 - protein, 8 aa, Artificial Sequence
  Artificially Synthesized Peptide
LGAKSVQH

SEQ ID NO: 2605 - protein, 10 aa, Artificial Sequence
  Artificially Synthesized Peptide
LGCAANWILR

SEQ ID NO: 2606 - protein, 9 aa, Artificial Sequence
  Artificially Synthesized Peptide
LGIHLNPNK

SEQ ID NO: 2607 - protein, 11 aa, Artificial Sequence
  Artificially Synthesized Peptide
LGIHLNPNKTK

SEQ ID NO: 2608 - protein, 10 aa, Artificial Sequence
  Artificially Synthesized Peptide
LIFLLVLLDY

SEQ ID NO: 2609 - protein, 8 aa, Artificial Sequence
  Artificially Synthesized Peptide
LIMPARFY

SEQ ID NO: 2610 - protein, 8 aa, Artificial Sequence
  Artificially Synthesized Peptide
LLAACFAR

SEQ ID NO: 2611 - protein, 10 aa, Artificial Sequence
  Artificially Synthesized Peptide
LLAACFARSR

SEQ ID NO: 2612 - protein, 9 aa, Artificial Sequence
  Artificially Synthesized Peptide
LLDTASALY

SEQ ID NO: 2613 - protein, 10 aa, Artificial Sequence
  Artificially Synthesized Peptide
LLDTASALYR

SEQ ID NO: 2614 - protein, 11 aa, Artificial Sequence
  Artificially Synthesized Peptide
LLGCAANWILR

SEQ ID NO: 2615 - protein, 11 aa, Artificial Sequence
  Artificially Synthesized Peptide
LLPIFFCLWVY

SEQ ID NO: 2616 - protein, 9 aa, Artificial Sequence
  Artificially Synthesized Peptide
LNPADDPSR

SEQ ID NO: 2617 - protein, 11 aa, Artificial Sequence
  Artificially Synthesized Peptide
LNPADDPSRGR

SEQ ID NO: 2618 - protein, 8 aa, Artificial Sequence
  Artificially Synthesized Peptide
LNPNKTKR

SEQ ID NO: 2619 - protein, 11 aa, Artificial Sequence
  Artificially Synthesized Peptide
LNPNKTKRWGY

SEQ ID NO: 2620 - protein, 9 aa, Artificial Sequence
  Artificially Synthesized Peptide
LNVSIPWTH

SEQ ID NO: 2621 - protein, 10 aa, Artificial Sequence
  Artificially Synthesized Peptide
LNVSIPWTHK

SEQ ID NO: 2622 - protein, 10 aa, Artificial Sequence
  Artificially Synthesized Peptide
LSLDVSAAFY

SEQ ID NO: 2623 - protein, 11 aa, Artificial Sequence
  Artificially Synthesized Peptide
LSLDVSAAFYH

SEQ ID NO: 2624 - protein, 11 aa, Artificial Sequence
  Artificially Synthesized Peptide
LSLGIHLNPNK

SEQ ID NO: 2625 - protein, 11 aa, Artificial Sequence
  Artificially Synthesized Peptide
LSTLPETTVVR

SEQ ID NO: 2626 - protein, 8 aa, Artificial Sequence
  Artificially Synthesized Peptide
LSYQHFRK

SEQ ID NO: 2627 - protein, 11 aa, Artificial Sequence
  Artificially Synthesized Peptide
LTFGRETVLEY

SEQ ID NO: 2628 - protein, 8 aa, Artificial Sequence
  Artificially Synthesized Peptide
LTVNEKRR

SEQ ID NO: 2629 - protein, 9 aa, Artificial Sequence
  Artificially Synthesized Peptide
LVSFGVWIR

SEQ ID NO: 2630 - protein, 10 aa, Artificial Sequence
  Artificially Synthesized Peptide
LVVDFSQFSR

SEQ ID NO: 2631 - protein, 9 aa, Artificial Sequence
  Artificially Synthesized Peptide
MDDVVLGAK

SEQ ID NO: 2632 - protein, 10 aa, Artificial Sequence
  Artificially Synthesized Peptide
MMWYWGPSLY

SEQ ID NO: 2633 - protein, 9 aa, Artificial Sequence
  Artificially Synthesized Peptide
MSTTDLEAY

SEQ ID NO: 2634 - protein, 11 aa, Artificial Sequence
  Artificially Synthesized Peptide
MSTTDLEAYFK

SEQ ID NO: 2635 - protein, 9 aa, Artificial Sequence
  Artificially Synthesized Peptide
NFLLSLGIH

SEQ ID NO: 2636 - protein, 8 aa, Artificial Sequence
  Artificially Synthesized Peptide
NLEDPASR

SEQ ID NO: 2637 - protein, 10 aa, Artificial Sequence
  Artificially Synthesized Peptide
NLNVSIPWTH

SEQ ID NO: 2638 - protein, 11 aa, Artificial Sequence
  Artificially Synthesized Peptide
NLNVSIPWTHK

SEQ ID NO: 2639 - protein, 9 aa, Artificial Sequence
  Artificially Synthesized Peptide
NSQSPTSNH

SEQ ID NO: 2640 - protein, 8 aa, Artificial Sequence
  Artificially Synthesized Peptide
NSVVLSRK

SEQ ID NO: 2641 - protein, 9 aa, Artificial Sequence
  Artificially Synthesized Peptide
NSVVLSRKY

SEQ ID NO: 2642 - protein, 8 aa, Artificial Sequence
  Artificially Synthesized Peptide
NVSIPWTH

SEQ ID NO: 2643 - protein, 9 aa, Artificial Sequence
  Artificially Synthesized Peptide
NVSIPWTHK

SEQ ID NO: 2644 - protein, 9 aa, Artificial Sequence
  Artificially Synthesized Peptide
PADDPSRGR

SEQ ID NO: 2645 - protein, 9 aa, Artificial Sequence
  Artificially Synthesized Peptide
PARDVLCLR

SEQ ID NO: 2646 - protein, 10 aa, Artificial Sequence
  Artificially Synthesized Peptide
PASTNRQSGR

SEQ ID NO: 2647 - protein, 10 aa, Artificial Sequence
  Artificially Synthesized Peptide
PCALRFTSAR

SEQ ID NO: 2648 - protein, 9 aa, Artificial Sequence
  Artificially Synthesized Peptide
PGYRWMCLR

SEQ ID NO: 2649 - protein, 10 aa, Artificial Sequence
  Artificially Synthesized Peptide
PGYRWMCLRR

SEQ ID NO: 2650 - protein, 9 aa, Artificial Sequence
  Artificially Synthesized Peptide
PIDWKVCQR

SEQ ID NO: 2651 - protein, 9 aa, Artificial Sequence
  Artificially Synthesized Peptide
PIFFCLWVY

SEQ ID NO: 2652 - protein, 8 aa, Artificial Sequence
  Artificially Synthesized Peptide
PIILGFRK

SEQ ID NO: 2653 - protein, 9 aa, Artificial Sequence
  Artificially Synthesized Peptide
PLDKGIKPY

SEQ ID NO: 2654 - protein, 10 aa, Artificial Sequence
  Artificially Synthesized Peptide
PLDKGIKPYY

SEQ ID NO: 2655 - protein, 8 aa, Artificial Sequence
  Artificially Synthesized Peptide
PLEEELPR

SEQ ID NO: 2656 - protein, 8 aa, Artificial Sequence
  Artificially Synthesized Peptide
PLGFFPDH

SEQ ID NO: 2657 - protein, 9 aa, Artificial Sequence
  Artificially Synthesized Peptide
PLHPAAMPH

SEQ ID NO: 2658 - protein, 8 aa, Artificial Sequence
  Artificially Synthesized Peptide
PLSYQHFR

SEQ ID NO: 2659 - protein, 9 aa, Artificial Sequence
  Artificially Synthesized Peptide
PLSYQHFRK

SEQ ID NO: 2660 - protein, 8 aa, Artificial Sequence
  Artificially Synthesized Peptide
PLTVNEKR

SEQ ID NO: 2661 - protein, 9 aa, Artificial Sequence
  Artificially Synthesized Peptide
PLTVNEKRR

SEQ ID NO: 2662 - protein, 9 aa, Artificial Sequence
  Artificially Synthesized Peptide
PNKTKRWGY

SEQ ID NO: 2663 - protein, 9 aa, Artificial Sequence
  Artificially Synthesized Peptide
PTTGRTSLY

SEQ ID NO: 2664 - protein, 9 aa, Artificial Sequence
  Artificially Synthesized Peptide
PVGAESRGR

SEQ ID NO: 2665 - protein, 9 aa, Artificial Sequence
  Artificially Synthesized Peptide
PVNRPIDWK

SEQ ID NO: 2666 - protein, 9 aa, Artificial Sequence
  Artificially Synthesized Peptide
QAFTFSPTY

SEQ ID NO: 2667 - protein, 10 aa, Artificial Sequence
  Artificially Synthesized Peptide
QAFTFSPTYK

SEQ ID NO: 2668 - protein, 9 aa, Artificial Sequence
  Artificially Synthesized Peptide
QAGFFLLTR

SEQ ID NO: 2669 - protein, 11 aa, Artificial Sequence
  Artificially Synthesized Peptide
QAMQWNSTTFH

SEQ ID NO: 2670 - protein, 11 aa, Artificial Sequence
  Artificially Synthesized Peptide
QCGYPALMPLY

SEQ ID NO: 2671 - protein, 11 aa, Artificial Sequence
  Artificially Synthesized Peptide
QFTSAICSVVR

SEQ ID NO: 2672 - protein, 11 aa, Artificial Sequence
  Artificially Synthesized Peptide
QSPRRRRSQSR

SEQ ID NO: 2673 - protein, 8 aa, Artificial Sequence
  Artificially Synthesized Peptide
QSSGILSR

SEQ ID NO: 2674 - protein, 11 aa, Artificial Sequence
  Artificially Synthesized Peptide
RAFPHCLAFSY

SEQ ID NO: 2675 - protein, 11 aa, Artificial Sequence
  Artificially Synthesized Peptide
RDLLDTASALY

SEQ ID NO: 2676 - protein, 8 aa, Artificial Sequence
  Artificially Synthesized Peptide
RGRSPRRR

SEQ ID NO: 2677 - protein, 9 aa, Artificial Sequence
  Artificially Synthesized Peptide
RLKLIMPAR

SEQ ID NO: 2678 - protein, 11 aa, Artificial Sequence
  Artificially Synthesized Peptide
RLKLIMPARFY

SEQ ID NO: 2679 - protein, 11 aa, Artificial Sequence
  Artificially Synthesized Peptide
RLKVFVLGGCR

SEQ ID NO: 2680 - protein, 11 aa, Artificial Sequence
  Artificially Synthesized Peptide
RLVVDFSQFSR

SEQ ID NO: 2681 - protein, 11 aa, Artificial Sequence
  Artificially Synthesized Peptide
RSPRRRTPSPR

SEQ ID NO: 2682 - protein, 8 aa, Artificial Sequence
  Artificially Synthesized Peptide
RSQSPRRR

SEQ ID NO: 2683 - protein, 9 aa, Artificial Sequence
  Artificially Synthesized Peptide
RSQSPRRRR

SEQ ID NO: 2684 - protein, 8 aa, Artificial Sequence
  Artificially Synthesized Peptide
RTPSPRRR

SEQ ID NO: 2685 - protein, 9 aa, Artificial Sequence
  Artificially Synthesized Peptide
RTPSPRRRR

SEQ ID NO: 2686 - protein, 9 aa, Artificial Sequence
  Artificially Synthesized Peptide
RVHFASPLH

SEQ ID NO: 2687 - protein, 11 aa, Artificial Sequence
  Artificially Synthesized Peptide
RVTGGVFLVDK

SEQ ID NO: 2688 - protein, 8 aa, Artificial Sequence
  Artificially Synthesized Peptide
SAGPCALR

SEQ ID NO: 2689 - protein, 8 aa, Artificial Sequence
  Artificially Synthesized Peptide
SAICSVVR

SEQ ID NO: 2690 - protein, 9 aa, Artificial Sequence
  Artificially Synthesized Peptide
SAICSVVRR

SEQ ID NO: 2691 - protein, 11 aa, Artificial Sequence
  Artificially Synthesized Peptide
SALNPADDPSR

SEQ ID NO: 2692 - protein, 9 aa, Artificial Sequence
  Artificially Synthesized Peptide
SASFCGSPY

SEQ ID NO: 2693 - protein, 9 aa, Artificial Sequence
  Artificially Synthesized Peptide
SLDVSAAFY

SEQ ID NO: 2694 - protein, 10 aa, Artificial Sequence
  Artificially Synthesized Peptide
SLDVSAAFYH

SEQ ID NO: 2695 - protein, 10 aa, Artificial Sequence
  Artificially Synthesized Peptide
SLGIHLNPNK

SEQ ID NO: 2696 - protein, 9 aa, Artificial Sequence
  Artificially Synthesized Peptide
SSAGPCALR

SEQ ID NO: 2697 - protein, 10 aa, Artificial Sequence
  Artificially Synthesized Peptide
STLPETTVVR

SEQ ID NO: 2698 - protein, 11 aa, Artificial Sequence
  Artificially Synthesized Peptide
STLPETTVVRR

SEQ ID NO: 2699 - protein, 8 aa, Artificial Sequence
  Artificially Synthesized Peptide
STNRQSGR

SEQ ID NO: 2700 - protein, 8 aa, Artificial Sequence
  Artificially Synthesized Peptide
STTDLEAY

SEQ ID NO: 2701 - protein, 10 aa, Artificial Sequence
  Artificially Synthesized Peptide
STTDLEAYFK

SEQ ID NO: 2702 - protein, 8 aa, Artificial Sequence
  Artificially Synthesized Peptide
SVVLSRKY

SEQ ID NO: 2703 - protein, 9 aa, Artificial Sequence
  Artificially Synthesized Peptide
SVVRRAFPH

SEQ ID NO: 2704 - protein, 11 aa, Artificial Sequence
  Artificially Synthesized Peptide
TAELLAACFAR

SEQ ID NO: 2705 - protein, 8 aa, Artificial Sequence
  Artificially Synthesized Peptide
TDLEAYFK

SEQ ID NO: 2706 - protein, 9 aa, Artificial Sequence
  Artificially Synthesized Peptide
TDNSVVLSR

SEQ ID NO: 2707 - protein, 10 aa, Artificial Sequence
  Artificially Synthesized Peptide
TDNSVVLSRK

SEQ ID NO: 2708 - protein, 11 aa, Artificial Sequence
  Artificially Synthesized Peptide
TDNSVVLSRKY

SEQ ID NO: 2709 - protein, 10 aa, Artificial Sequence
  Artificially Synthesized Peptide
TFGRETVLEY

SEQ ID NO: 2710 - protein, 9 aa, Artificial Sequence
  Artificially Synthesized Peptide
TGGVFLVDK

SEQ ID NO: 2711 - protein, 9 aa, Artificial Sequence
  Artificially Synthesized Peptide
TLPETTVVR

SEQ ID NO: 2712 - protein, 10 aa, Artificial Sequence
  Artificially Synthesized Peptide
TLPETTVVRR

SEQ ID NO: 2713 - protein, 11 aa, Artificial Sequence
  Artificially Synthesized Peptide
TLPETTVVRRR

SEQ ID NO: 2714 - protein, 9 aa, Artificial Sequence
  Artificially Synthesized Peptide
TLWKAGILY

SEQ ID NO: 2715 - protein, 10 aa, Artificial Sequence
  Artificially Synthesized Peptide
TLWKAGILYK

SEQ ID NO: 2716 - protein, 11 aa, Artificial Sequence
  Artificially Synthesized Peptide
TLWKAGILYKR

SEQ ID NO: 2717 - protein, 10 aa, Artificial Sequence
  Artificially Synthesized Peptide
TNFLLSLGIH

SEQ ID NO: 2718 - protein, 9 aa, Artificial Sequence
  Artificially Synthesized Peptide
TSAICSVVR

SEQ ID NO: 2719 - protein, 10 aa, Artificial Sequence
  Artificially Synthesized Peptide
TSAICSVVRR

SEQ ID NO: 2720 - protein, 9 aa, Artificial Sequence
  Artificially Synthesized Peptide
TTDLEAYFK

SEQ ID NO: 2721 - protein, 8 aa, Artificial Sequence
  Artificially Synthesized Peptide
TTGRTSLY

SEQ ID NO: 2722 - protein, 8 aa, Artificial Sequence
  Artificially Synthesized Peptide
TTSTGPCK

SEQ ID NO: 2723 - protein, 9 aa, Artificial Sequence
  Artificially Synthesized Peptide
TTVVRRRGR

SEQ ID NO: 2724 - protein, 8 aa, Artificial Sequence
  Artificially Synthesized Peptide
TVVRRRGR

SEQ ID NO: 2725 - protein, 11 aa, Artificial Sequence
  Artificially Synthesized Peptide
TVVRRRGRSPR

SEQ ID NO: 2726 - protein, 8 aa, Artificial Sequence
  Artificially Synthesized Peptide
VDFSQFSR

SEQ ID NO: 2727 - protein, 9 aa, Artificial Sequence
  Artificially Synthesized Peptide
VFLVDKNPH

SEQ ID NO: 2728 - protein, 8 aa, Artificial Sequence
  Artificially Synthesized Peptide
VFVLGGCR

SEQ ID NO: 2729 - protein, 9 aa, Artificial Sequence
  Artificially Synthesized Peptide
VFVLGGCRH

SEQ ID NO: 2730 - protein, 10 aa, Artificial Sequence
  Artificially Synthesized Peptide
VFVLGGCRHK

SEQ ID NO: 2731 - protein, 8 aa, Artificial Sequence
  Artificially Synthesized Peptide
VGAESRGR

SEQ ID NO: 2732 - protein, 8 aa, Artificial Sequence
  Artificially Synthesized Peptide
VGNFTGLY

SEQ ID NO: 2733 - protein, 9 aa, Artificial Sequence
  Artificially Synthesized Peptide
VGPLTVNEK

SEQ ID NO: 2734 - protein, 10 aa, Artificial Sequence
  Artificially Synthesized Peptide
VGPLTVNEKR

SEQ ID NO: 2735 - protein, 11 aa, Artificial Sequence
  Artificially Synthesized Peptide
VGPLTVNEKRR

SEQ ID NO: 2736 - protein, 9 aa, Artificial Sequence
  Artificially Synthesized Peptide
VLGAKSVQH

SEQ ID NO: 2737 - protein, 8 aa, Artificial Sequence
  Artificially Synthesized Peptide
VLGGCRHK

SEQ ID NO: 2738 - protein, 11 aa, Artificial Sequence
  Artificially Synthesized Peptide
VLQAGFFLLTR

SEQ ID NO: 2739 - protein, 8 aa, Artificial Sequence
  Artificially Synthesized Peptide
VNRPIDWK

SEQ ID NO: 2740 - protein, 8 aa, Artificial Sequence
  Artificially Synthesized Peptide
VSFGVWIR

SEQ ID NO: 2741 - protein, 8 aa, Artificial Sequence
  Artificially Synthesized Peptide
VSIPWTHK

SEQ ID NO: 2742 - protein, 10 aa, Artificial Sequence
  Artificially Synthesized Peptide
VTGGVFLVDK

SEQ ID NO: 2743 - protein, 9 aa, Artificial Sequence
  Artificially Synthesized Peptide
VVDFSQFSR

SEQ ID NO: 2744 - protein, 10 aa, Artificial Sequence
  Artificially Synthesized Peptide
VVLGAKSVQH

SEQ ID NO: 2745 - protein, 8 aa, Artificial Sequence
  Artificially Synthesized Peptide
VVRRAFPH

SEQ ID NO: 2746 - protein, 10 aa, Artificial Sequence
  Artificially Synthesized Peptide
VVRRRGRSPR

SEQ ID NO: 2747 - protein, 11 aa, Artificial Sequence
  Artificially Synthesized Peptide
VVRRRGRSPRR

SEQ ID NO: 2748 - protein, 11 aa, Artificial Sequence
  Artificially Synthesized Peptide
WFHISCLTFGR

SEQ ID NO: 2749 - protein, 8 aa, Artificial Sequence
  Artificially Synthesized Peptide
WGMDIDPY

SEQ ID NO: 2750 - protein, 9 aa, Artificial Sequence
  Artificially Synthesized Peptide
WGMDIDPYK

SEQ ID NO: 2751 - protein, 10 aa, Artificial Sequence
  Artificially Synthesized Peptide
WGYSLNFMGY

SEQ ID NO: 2752 - protein, 10 aa, Artificial Sequence
  Artificially Synthesized Peptide
WILRGTSFVY

SEQ ID NO: 2753 - protein, 8 aa, Artificial Sequence
  Artificially Synthesized Peptide
WIRTPPAY

SEQ ID NO: 2754 - protein, 9 aa, Artificial Sequence
  Artificially Synthesized Peptide
WIRTPPAYR

SEQ ID NO: 2755 - protein, 8 aa, Artificial Sequence
  Artificially Synthesized Peptide
WLQFRNSK

SEQ ID NO: 2756 - protein, 11 aa, Artificial Sequence
  Artificially Synthesized Peptide
WLSLDVSAAFY

SEQ ID NO: 2757 - protein, 10 aa, Artificial Sequence
  Artificially Synthesized Peptide
WLWGMDIDPY

SEQ ID NO: 2758 - protein, 11 aa, Artificial Sequence
  Artificially Synthesized Peptide
WLWGMDIDPYK

SEQ ID NO: 2759 - protein, 11 aa, Artificial Sequence
  Artificially Synthesized Peptide
WMMWYWGPSLY

SEQ ID NO: 2760 - protein, 9 aa, Artificial Sequence
  Artificially Synthesized Peptide
YLPLDKGIK

SEQ ID NO: 2761 - protein, 11 aa, Artificial Sequence
  Artificially Synthesized Peptide
YLPLDKGIKPY

SEQ ID NO: 2762 - protein, 10 aa, Artificial Sequence
  Artificially Synthesized Peptide
YLVSFGVWIR

SEQ ID NO: 2763 - protein, 10 aa, Artificial Sequence
  Artificially Synthesized Peptide
YMDDVVLGAK

SEQ ID NO: 2764 - protein, 10 aa, Artificial Sequence
  Artificially Synthesized Peptide
YSHPIILGFR

SEQ ID NO: 2765 - protein, 11 aa, Artificial Sequence
  Artificially Synthesized Peptide
YSHPIILGFRK

SEQ ID NO: 2766 - protein, 8 aa, Artificial Sequence
  Artificially Synthesized Peptide
YSLNFMGY

SEQ ID NO: 2767 - protein, 8 aa, Artificial Sequence
  Artificially Synthesized Peptide
AFPHCLAF

SEQ ID NO: 2768 - protein, 10 aa, Artificial Sequence
  Artificially Synthesized Peptide
AFSSAGPCAL

SEQ ID NO: 2769 - protein, 10 aa, Artificial Sequence
  Artificially Synthesized Peptide
AFSYMDDVVL

SEQ ID NO: 2770 - protein, 11 aa, Artificial Sequence
  Artificially Synthesized Peptide
AFTFSPTYKAF

SEQ ID NO: 2771 - protein, 9 aa, Artificial Sequence
  Artificially Synthesized Peptide
AMQWNSTTF

SEQ ID NO: 2772 - protein, 9 aa, Artificial Sequence
  Artificially Synthesized Peptide
AYRPPNAPI

SEQ ID NO: 2773 - protein, 10 aa, Artificial Sequence
  Artificially Synthesized Peptide
AYRPPNAPIL

SEQ ID NO: 2774 - protein, 11 aa, Artificial Sequence
  Artificially Synthesized Peptide
CFRKLPVNRPI

SEQ ID NO: 2775 - protein, 8 aa, Artificial Sequence
  Artificially Synthesized Peptide
DWKVCQRI

SEQ ID NO: 2776 - protein, 11 aa, Artificial Sequence
  Artificially Synthesized Peptide
DWKVCQRIVGL

SEQ ID NO: 2777 - protein, 11 aa, Artificial Sequence
  Artificially Synthesized Peptide
DYQGMLPVCPL

SEQ ID NO: 2778 - protein, 9 aa, Artificial Sequence
  Artificially Synthesized Peptide
EYLVSFGVW

SEQ ID NO: 2779 - protein, 10 aa, Artificial Sequence
  Artificially Synthesized Peptide
EYLVSFGVWI

SEQ ID NO: 2780 - protein, 8 aa, Artificial Sequence
  Artificially Synthesized Peptide
FFCLWVYI

SEQ ID NO: 2781 - protein, 8 aa, Artificial Sequence
  Artificially Synthesized Peptide
FFLLTRIL

SEQ ID NO: 2782 - protein, 10 aa, Artificial Sequence
  Artificially Synthesized Peptide
FFLLTRILTI

SEQ ID NO: 2783 - protein, 11 aa, Artificial Sequence
  Artificially Synthesized Peptide
FFPDHQLDPAF

SEQ ID NO: 2784 - protein, 8 aa, Artificial Sequence
  Artificially Synthesized Peptide
GFFLLTRI

SEQ ID NO: 2785 - protein, 9 aa, Artificial Sequence
  Artificially Synthesized Peptide
GFFLLTRIL

SEQ ID NO: 2786 - protein, 11 aa, Artificial Sequence
  Artificially Synthesized Peptide
GFFLLTRILTI

SEQ ID NO: 2787 - protein, 8 aa, Artificial Sequence
  Artificially Synthesized Peptide
GFFPDHQL

SEQ ID NO: 2788 - protein, 9 aa, Artificial Sequence
  Artificially Synthesized Peptide
GFLGPLLVL

SEQ ID NO: 2789 - protein, 11 aa, Artificial Sequence
  Artificially Synthesized Peptide
GFRKIPMGVGL

SEQ ID NO: 2790 - protein, 10 aa, Artificial Sequence
  Artificially Synthesized Peptide
GMDIDPYKEF

SEQ ID NO: 2791 - protein, 8 aa, Artificial Sequence
  Artificially Synthesized Peptide
GMLPVCPL

SEQ ID NO: 2792 - protein, 8 aa, Artificial Sequence
  Artificially Synthesized Peptide
GWLWGMDI

SEQ ID NO: 2793 - protein, 9 aa, Artificial Sequence
  Artificially Synthesized Peptide
GWSPQAQGI

SEQ ID NO: 2794 - protein, 10 aa, Artificial Sequence
  Artificially Synthesized Peptide
GWSPQAQGIL

SEQ ID NO: 2795 - protein, 8 aa, Artificial Sequence
  Artificially Synthesized Peptide
GYPALMPL

SEQ ID NO: 2796 - protein, 10 aa, Artificial Sequence
  Artificially Synthesized Peptide
GYRWMCLRRF

SEQ ID NO: 2797 - protein, 11 aa, Artificial Sequence
  Artificially Synthesized Peptide
GYRWMCLRRFI

SEQ ID NO: 2798 - protein, 11 aa, Artificial Sequence
  Artificially Synthesized Peptide
GYSLNFMGYVI

SEQ ID NO: 2799 - protein, 10 aa, Artificial Sequence
  Artificially Synthesized Peptide
HFASPLHVAW

SEQ ID NO: 2800 - protein, 8 aa, Artificial Sequence
  Artificially Synthesized Peptide
HFRKLLLL

SEQ ID NO: 2801 - protein, 11 aa, Artificial Sequence
  Artificially Synthesized Peptide
HYLHTLWKAGI

SEQ ID NO: 2802 - protein, 9 aa, Artificial Sequence
  Artificially Synthesized Peptide
IFFCLWVYI

SEQ ID NO: 2803 - protein, 8 aa, Artificial Sequence
  Artificially Synthesized Peptide
IFLFILLL

SEQ ID NO: 2804 - protein, 10 aa, Artificial Sequence
  Artificially Synthesized Peptide
IFLFILLLCL

SEQ ID NO: 2805 - protein, 11 aa, Artificial Sequence
  Artificially Synthesized Peptide
IFLFILLLCLI

SEQ ID NO: 2806 - protein, 11 aa, Artificial Sequence
  Artificially Synthesized Peptide
IWMMWYWGPSL

SEQ ID NO: 2807 - protein, 10 aa, Artificial Sequence
  Artificially Synthesized Peptide
KFAVPNLQSL

SEQ ID NO: 2808 - protein, 9 aa, Artificial Sequence
  Artificially Synthesized Peptide
KYLPLDKGI

SEQ ID NO: 2809 - protein, 8 aa, Artificial Sequence
  Artificially Synthesized Peptide
KYTSFPWL

SEQ ID NO: 2810 - protein, 9 aa, Artificial Sequence
  Artificially Synthesized Peptide
KYTSFPWLL

SEQ ID NO: 2811 - protein, 8 aa, Artificial Sequence
  Artificially Synthesized Peptide
LFILLLCL

SEQ ID NO: 2812 - protein, 9 aa, Artificial Sequence
  Artificially Synthesized Peptide
LFILLLCLI

SEQ ID NO: 2813 - protein, 10 aa, Artificial Sequence
  Artificially Synthesized Peptide
LFILLLCLIF

SEQ ID NO: 2814 - protein, 11 aa, Artificial Sequence
  Artificially Synthesized Peptide
LFILLLCLIFL

SEQ ID NO: 2815 - protein, 8 aa, Artificial Sequence
  Artificially Synthesized Peptide
LMPLYACI

SEQ ID NO: 2816 - protein, 8 aa, Artificial Sequence
  Artificially Synthesized Peptide
LWFHISCL

SEQ ID NO: 2817 - protein, 10 aa, Artificial Sequence
  Artificially Synthesized Peptide
LWFHISCLTF

SEQ ID NO: 2818 - protein, 8 aa, Artificial Sequence
  Artificially Synthesized Peptide
LYSHPIIL

SEQ ID NO: 2819 - protein, 10 aa, Artificial Sequence
  Artificially Synthesized Peptide
LYSHPIILGF

SEQ ID NO: 2820 - protein, 9 aa, Artificial Sequence
  Artificially Synthesized Peptide
MMWYWGPSL

SEQ ID NO: 2821 - protein, 8 aa, Artificial Sequence
  Artificially Synthesized Peptide
MWYWGPSL

SEQ ID NO: 2822 - protein, 8 aa, Artificial Sequence
  Artificially Synthesized Peptide
NFLLSLGI

SEQ ID NO: 2823 - protein, 10 aa, Artificial Sequence
  Artificially Synthesized Peptide
NFLLSLGIHL

SEQ ID NO: 2824 - protein, 9 aa, Artificial Sequence
  Artificially Synthesized Peptide
NWILRGTSF

SEQ ID NO: 2825 - protein, 11 aa, Artificial Sequence
  Artificially Synthesized Peptide
PFLLAQFTSAI

SEQ ID NO: 2826 - protein, 10 aa, Artificial Sequence
  Artificially Synthesized Peptide
PFTQCGYPAL

SEQ ID NO: 2827 - protein, 9 aa, Artificial Sequence
  Artificially Synthesized Peptide
PFVQWFVGL

SEQ ID NO: 2828 - protein, 9 aa, Artificial Sequence
  Artificially Synthesized Peptide
PMGVGLSPF

SEQ ID NO: 2829 - protein, 10 aa, Artificial Sequence
  Artificially Synthesized Peptide
PMGVGLSPFL

SEQ ID NO: 2830 - protein, 11 aa, Artificial Sequence
  Artificially Synthesized Peptide
PMGVGLSPFLL

SEQ ID NO: 2831 - protein, 10 aa, Artificial Sequence
  Artificially Synthesized Peptide
PWLLGCAANW

SEQ ID NO: 2832 - protein, 11 aa, Artificial Sequence
  Artificially Synthesized Peptide
PWLLGCAANWI

SEQ ID NO: 2833 - protein, 9 aa, Artificial Sequence
  Artificially Synthesized Peptide
PWTHKVGNF

SEQ ID NO: 2834 - protein, 11 aa, Artificial Sequence
  Artificially Synthesized Peptide
QWFVGLSPTVW

SEQ ID NO: 2835 - protein, 8 aa, Artificial Sequence
  Artificially Synthesized Peptide
RFIIFLFI

SEQ ID NO: 2836 - protein, 9 aa, Artificial Sequence
  Artificially Synthesized Peptide
RFIIFLFIL

SEQ ID NO: 2837 - protein, 10 aa, Artificial Sequence
  Artificially Synthesized Peptide
RFIIFLFILL

SEQ ID NO: 2838 - protein, 11 aa, Artificial Sequence
  Artificially Synthesized Peptide
RFIIFLFILLL

SEQ ID NO: 2839 - protein, 8 aa, Artificial Sequence
  Artificially Synthesized Peptide
RFSWLSLL

SEQ ID NO: 2840 - protein, 11 aa, Artificial Sequence
  Artificially Synthesized Peptide
RFSWLSLLVPF

SEQ ID NO: 2841 - protein, 8 aa, Artificial Sequence
  Artificially Synthesized Peptide
RWGYSLNF

SEQ ID NO: 2842 - protein, 8 aa, Artificial Sequence
  Artificially Synthesized Peptide
RWMCLRRF

SEQ ID NO: 2843 - protein, 9 aa, Artificial Sequence
  Artificially Synthesized Peptide
RWMCLRRFI

SEQ ID NO: 2844 - protein, 10 aa, Artificial Sequence
  Artificially Synthesized Peptide
RWMCLRRFII

SEQ ID NO: 2845 - protein, 11 aa, Artificial Sequence
  Artificially Synthesized Peptide
RWMCLRRFIIF

SEQ ID NO: 2846 - protein, 9 aa, Artificial Sequence
  Artificially Synthesized Peptide
SFCGSPYSW

SEQ ID NO: 2847 - protein, 8 aa, Artificial Sequence
  Artificially Synthesized Peptide
SFLPSDFF

SEQ ID NO: 2848 - protein, 9 aa, Artificial Sequence
  Artificially Synthesized Peptide
SFVYVPSAL

SEQ ID NO: 2849 - protein, 11 aa, Artificial Sequence
  Artificially Synthesized Peptide
SWLSLDVSAAF

SEQ ID NO: 2850 - protein, 9 aa, Artificial Sequence
  Artificially Synthesized Peptide
SWLSLLVPF

SEQ ID NO: 2851 - protein, 10 aa, Artificial Sequence
  Artificially Synthesized Peptide
SWPKFAVPNL

SEQ ID NO: 2852 - protein, 8 aa, Artificial Sequence
  Artificially Synthesized Peptide
SWWTSLNF

SEQ ID NO: 2853 - protein, 9 aa, Artificial Sequence
  Artificially Synthesized Peptide
SWWTSLNFL

SEQ ID NO: 2854 - protein, 8 aa, Artificial Sequence
  Artificially Synthesized Peptide
SYMDDVVL

SEQ ID NO: 2855 - protein, 8 aa, Artificial Sequence
  Artificially Synthesized Peptide
SYQHFRKL

SEQ ID NO: 2856 - protein, 9 aa, Artificial Sequence
  Artificially Synthesized Peptide
SYQHFRKLL

SEQ ID NO: 2857 - protein, 10 aa, Artificial Sequence
  Artificially Synthesized Peptide
SYQHFRKLLL

SEQ ID NO: 2858 - protein, 11 aa, Artificial Sequence
  Artificially Synthesized Peptide
SYQHFRKLLLL

SEQ ID NO: 2859 - protein, 8 aa, Artificial Sequence
  Artificially Synthesized Peptide
TFGRETVL

SEQ ID NO: 2860 - protein, 11 aa, Artificial Sequence
  Artificially Synthesized Peptide
TFGRETVLEYL

SEQ ID NO: 2861 - protein, 9 aa, Artificial Sequence
  Artificially Synthesized Peptide
TFSPTYKAF

SEQ ID NO: 2862 - protein, 10 aa, Artificial Sequence
  Artificially Synthesized Peptide
TFSPTYKAFL

SEQ ID NO: 2863 - protein, 10 aa, Artificial Sequence
  Artificially Synthesized Peptide
VFADATPTGW

SEQ ID NO: 2864 - protein, 11 aa, Artificial Sequence
  Artificially Synthesized Peptide
VFVLGGCRHKL

SEQ ID NO: 2865 - protein, 9 aa, Artificial Sequence
  Artificially Synthesized Peptide
WFHISCLTF

SEQ ID NO: 2866 - protein, 10 aa, Artificial Sequence
  Artificially Synthesized Peptide
WFVGLSPTVW

SEQ ID NO: 2867 - protein, 11 aa, Artificial Sequence
  Artificially Synthesized Peptide
WFVGLSPTVWL

SEQ ID NO: 2868 - protein, 8 aa, Artificial Sequence
  Artificially Synthesized Peptide
WMCLRRFI

SEQ ID NO: 2869 - protein, 9 aa, Artificial Sequence
  Artificially Synthesized Peptide
WMCLRRFII

SEQ ID NO: 2870 - protein, 10 aa, Artificial Sequence
  Artificially Synthesized Peptide
WMCLRRFIIF

SEQ ID NO: 2871 - protein, 11 aa, Artificial Sequence
  Artificially Synthesized Peptide
WMCLRRFIIFL

SEQ ID NO: 2872 - protein, 10 aa, Artificial Sequence
  Artificially Synthesized Peptide
WMMWYWGPSL

SEQ ID NO: 2873 - protein, 8 aa, Artificial Sequence
  Artificially Synthesized Peptide
WWTSLNFL

SEQ ID NO: 2874 - protein, 9 aa, Artificial Sequence
  Artificially Synthesized Peptide
FAAPFTQCG

SEQ ID NO: 2875 - protein, 9 aa, Artificial Sequence
  Artificially Synthesized Peptide
FADATPTGW

SEQ ID NO: 2876 - protein, 9 aa, Artificial Sequence
  Artificially Synthesized Peptide
FAVPNLQSL

SEQ ID NO: 2877 - protein, 9 aa, Artificial Sequence
  Artificially Synthesized Peptide
FGRETVLEY

SEQ ID NO: 2878 - protein, 9 aa, Artificial Sequence
  Artificially Synthesized Peptide
FGVEPSGSG

SEQ ID NO: 2879 - protein, 9 aa, Artificial Sequence
  Artificially Synthesized Peptide
FHISCLTFG

SEQ ID NO: 2880 - protein, 9 aa, Artificial Sequence
  Artificially Synthesized Peptide
FHLCLIISC

SEQ ID NO: 2881 - protein, 9 aa, Artificial Sequence
  Artificially Synthesized Peptide
FILLLCLIF

SEQ ID NO: 2882 - protein, 9 aa, Artificial Sequence
  Artificially Synthesized Peptide
FLFILLLCL

SEQ ID NO: 2883 - protein, 9 aa, Artificial Sequence
  Artificially Synthesized Peptide
FLGPLLVLQ

SEQ ID NO: 2884 - protein, 9 aa, Artificial Sequence
  Artificially Synthesized Peptide
FLLTRILTI

SEQ ID NO: 2885 - protein, 9 aa, Artificial Sequence
  Artificially Synthesized Peptide
FLLVLLDYQ

SEQ ID NO: 2886 - protein, 9 aa, Artificial Sequence
  Artificially Synthesized Peptide
FPAGGSSSG

SEQ ID NO: 2887 - protein, 9 aa, Artificial Sequence
  Artificially Synthesized Peptide
FPDHQLDPA

SEQ ID NO: 2888 - protein, 9 aa, Artificial Sequence
  Artificially Synthesized Peptide
FPHCLAFSY

SEQ ID NO: 2889 - protein, 9 aa, Artificial Sequence
  Artificially Synthesized Peptide
FRKIPMGVG

SEQ ID NO: 2890 - protein, 9 aa, Artificial Sequence
  Artificially Synthesized Peptide
FRKLPVNRP

SEQ ID NO: 2891 - protein, 9 aa, Artificial Sequence
  Artificially Synthesized Peptide
FSSAGPCAL

SEQ ID NO: 2892 - protein, 9 aa, Artificial Sequence
  Artificially Synthesized Peptide
FSWLSLLVP

SEQ ID NO: 2893 - protein, 9 aa, Artificial Sequence
  Artificially Synthesized Peptide
FTFSPTYKA

SEQ ID NO: 2894 - protein, 9 aa, Artificial Sequence
  Artificially Synthesized Peptide
FTGLYSSTV

SEQ ID NO: 2895 - protein, 9 aa, Artificial Sequence
  Artificially Synthesized Peptide
FTSAICSVV

SEQ ID NO: 2896 - protein, 9 aa, Artificial Sequence
  Artificially Synthesized Peptide
FVGLSPTVW

SEQ ID NO: 2897 - protein, 9 aa, Artificial Sequence
  Artificially Synthesized Peptide
FVLGGCRHK

SEQ ID NO: 2898 - protein, 9 aa, Artificial Sequence
  Artificially Synthesized Peptide
FVQWFVGLS

SEQ ID NO: 2899 - protein, 9 aa, Artificial Sequence
  Artificially Synthesized Peptide
FVYVPSALN

SEQ ID NO: 2900 - protein, 9 aa, Artificial Sequence
  Artificially Synthesized Peptide
IDWKVCQRI

SEQ ID NO: 2901 - protein, 9 aa, Artificial Sequence
  Artificially Synthesized Peptide
IFLFILLLC

SEQ ID NO: 2902 - protein, 9 aa, Artificial Sequence
  Artificially Synthesized Peptide
IFLLVLLDY

SEQ ID NO: 2903 - protein, 9 aa, Artificial Sequence
  Artificially Synthesized Peptide
IGTDNSVVL

SEQ ID NO: 2904 - protein, 9 aa, Artificial Sequence
  Artificially Synthesized Peptide
IHTAELLAA

SEQ ID NO: 2905 - protein, 9 aa, Artificial Sequence
  Artificially Synthesized Peptide
IIFLFILLL

SEQ ID NO: 2906 - protein, 9 aa, Artificial Sequence
  Artificially Synthesized Peptide
ILLLCLIFL

SEQ ID NO: 2907 - protein, 9 aa, Artificial Sequence
  Artificially Synthesized Peptide
ILRGTSFVY

SEQ ID NO: 2908 - protein, 9 aa, Artificial Sequence
  Artificially Synthesized Peptide
ILSTLPETT

SEQ ID NO: 2909 - protein, 9 aa, Artificial Sequence
  Artificially Synthesized Peptide
IPIPSSWAF

SEQ ID NO: 2910 - protein, 9 aa, Artificial Sequence
  Artificially Synthesized Peptide
IRTPPAYRP

SEQ ID NO: 2911 - protein, 9 aa, Artificial Sequence
  Artificially Synthesized Peptide
LAACFARSR

SEQ ID NO: 2912 - protein, 9 aa, Artificial Sequence
  Artificially Synthesized Peptide
LAFSYMDDV

SEQ ID NO: 2913 - protein, 9 aa, Artificial Sequence
  Artificially Synthesized Peptide
LAQFTSAIC

SEQ ID NO: 2914 - protein, 9 aa, Artificial Sequence
  Artificially Synthesized Peptide
LCLGWLWGM

SEQ ID NO: 2915 - protein, 9 aa, Artificial Sequence
  Artificially Synthesized Peptide
LCLIFLLVL

SEQ ID NO: 2916 - protein, 9 aa, Artificial Sequence
  Artificially Synthesized Peptide
LCLRPVGAE

SEQ ID NO: 2917 - protein, 9 aa, Artificial Sequence
  Artificially Synthesized Peptide
LCQVFADAT

SEQ ID NO: 2918 - protein, 9 aa, Artificial Sequence
  Artificially Synthesized Peptide
LDSWWTSLN

SEQ ID NO: 2919 - protein, 9 aa, Artificial Sequence
  Artificially Synthesized Peptide
LDTASALYR

SEQ ID NO: 2920 - protein, 9 aa, Artificial Sequence
  Artificially Synthesized Peptide
LDVSAAFYH

SEQ ID NO: 2921 - protein, 9 aa, Artificial Sequence
  Artificially Synthesized Peptide
LDYQGMLPV

SEQ ID NO: 2922 - protein, 9 aa, Artificial Sequence
  Artificially Synthesized Peptide
LEEELPRLA

SEQ ID NO: 2923 - protein, 9 aa, Artificial Sequence
  Artificially Synthesized Peptide
LFILLLCLI

SEQ ID NO: 2924 - protein, 9 aa, Artificial Sequence
  Artificially Synthesized Peptide
LGAKSVQHL

SEQ ID NO: 2925 - protein, 9 aa, Artificial Sequence
  Artificially Synthesized Peptide
LGFAAPFTQ

SEQ ID NO: 2926 - protein, 9 aa, Artificial Sequence
  Artificially Synthesized Peptide
LGFRKIPMG

SEQ ID NO: 2927 - protein, 9 aa, Artificial Sequence
  Artificially Synthesized Peptide
LGNLNVSIP

SEQ ID NO: 2928 - protein, 9 aa, Artificial Sequence
  Artificially Synthesized Peptide
LGPLLVLQA

SEQ ID NO: 2929 - protein, 9 aa, Artificial Sequence
  Artificially Synthesized Peptide
LHPAAMPHL

SEQ ID NO: 2930 - protein, 9 aa, Artificial Sequence
  Artificially Synthesized Peptide
LIFLLVLLD

SEQ ID NO: 2931 - protein, 9 aa, Artificial Sequence
  Artificially Synthesized Peptide
LKLIMPARF

SEQ ID NO: 2932 - protein, 9 aa, Artificial Sequence
  Artificially Synthesized Peptide
LKVFVLGGC

SEQ ID NO: 2933 - protein, 9 aa, Artificial Sequence
  Artificially Synthesized Peptide
LLAQFTSAI

SEQ ID NO: 2934 - protein, 9 aa, Artificial Sequence
  Artificially Synthesized Peptide
LLDTASALY

SEQ ID NO: 2935 - protein, 9 aa, Artificial Sequence
  Artificially Synthesized Peptide
LLGCAANWI

SEQ ID NO: 2936 - protein, 9 aa, Artificial Sequence
  Artificially Synthesized Peptide
LLGFAAPFT

SEQ ID NO: 2937 - protein, 9 aa, Artificial Sequence
  Artificially Synthesized Peptide
LLGWSPQAQ

SEQ ID NO: 2938 - protein, 9 aa, Artificial Sequence
  Artificially Synthesized Peptide
LLLCLIFLL

SEQ ID NO: 2939 - protein, 9 aa, Artificial Sequence
  Artificially Synthesized Peptide
LLSFLPSDF

SEQ ID NO: 2940 - protein, 9 aa, Artificial Sequence
  Artificially Synthesized Peptide
LLSLGIHLN

SEQ ID NO: 2941 - protein, 9 aa, Artificial Sequence
  Artificially Synthesized Peptide
LLSSNLSWL

SEQ ID NO: 2942 - protein, 9 aa, Artificial Sequence
  Artificially Synthesized Peptide
LLTRILTIP

SEQ ID NO: 2943 - protein, 9 aa, Artificial Sequence
  Artificially Synthesized Peptide
LLVLQAGFF

SEQ ID NO: 2944 - protein, 9 aa, Artificial Sequence
  Artificially Synthesized Peptide
LLVPFVQWF

SEQ ID NO: 2945 - protein, 9 aa, Artificial Sequence
  Artificially Synthesized Peptide
LLWFHISCL

SEQ ID NO: 2946 - protein, 9 aa, Artificial Sequence
  Artificially Synthesized Peptide
LMPLYACIQ

SEQ ID NO: 2947 - protein, 9 aa, Artificial Sequence
  Artificially Synthesized Peptide
LNLGNLNVS

SEQ ID NO: 2948 - protein, 9 aa, Artificial Sequence
  Artificially Synthesized Peptide
LNPNKTKRW

SEQ ID NO: 2949 - protein, 9 aa, Artificial Sequence
  Artificially Synthesized Peptide
LNRRVAEDL

SEQ ID NO: 2950 - protein, 9 aa, Artificial Sequence
  Artificially Synthesized Peptide
LNVSIPWTH

SEQ ID NO: 2951 - protein, 9 aa, Artificial Sequence
  Artificially Synthesized Peptide
LPETTVVRR

SEQ ID NO: 2952 - protein, 9 aa, Artificial Sequence
  Artificially Synthesized Peptide
LPIFFCLWV

SEQ ID NO: 2953 - protein, 9 aa, Artificial Sequence
  Artificially Synthesized Peptide
LPIHTAELL

SEQ ID NO: 2954 - protein, 9 aa, Artificial Sequence
  Artificially Synthesized Peptide
LPVNRPIDW

SEQ ID NO: 2955 - protein, 9 aa, Artificial Sequence
  Artificially Synthesized Peptide
LQFRNSKPC

SEQ ID NO: 2956 - protein, 9 aa, Artificial Sequence
  Artificially Synthesized Peptide
LRGLPVCAF

SEQ ID NO: 2957 - protein, 9 aa, Artificial Sequence
  Artificially Synthesized Peptide
LRPVGAESR

SEQ ID NO: 2958 - protein, 9 aa, Artificial Sequence
  Artificially Synthesized Peptide
LRQAILCWG

SEQ ID NO: 2959 - protein, 9 aa, Artificial Sequence
  Artificially Synthesized Peptide
LRRFIIFLF

SEQ ID NO: 2960 - protein, 9 aa, Artificial Sequence
  Artificially Synthesized Peptide
LSFLPSDFF

SEQ ID NO: 2961 - protein, 9 aa, Artificial Sequence
  Artificially Synthesized Peptide
LSLDVSAAF

SEQ ID NO: 2962 - protein, 9 aa, Artificial Sequence
  Artificially Synthesized Peptide
LSLLVPFVQ

SEQ ID NO: 2963 - protein, 9 aa, Artificial Sequence
  Artificially Synthesized Peptide
LSLRGLPVC

SEQ ID NO: 2964 - protein, 9 aa, Artificial Sequence
  Artificially Synthesized Peptide
LSPFLLAQF

SEQ ID NO: 2965 - protein, 9 aa, Artificial Sequence
  Artificially Synthesized Peptide
LSRKYTSFP

SEQ ID NO: 2966 - protein, 9 aa, Artificial Sequence
  Artificially Synthesized Peptide
LSSNLSWLS

SEQ ID NO: 2967 - protein, 9 aa, Artificial Sequence
  Artificially Synthesized Peptide
LSVPNPLGF

SEQ ID NO: 2968 - protein, 9 aa, Artificial Sequence
  Artificially Synthesized Peptide
LSWLSLDVS

SEQ ID NO: 2969 - protein, 9 aa, Artificial Sequence
  Artificially Synthesized Peptide
LTIPQSLDS

SEQ ID NO: 2970 - protein, 9 aa, Artificial Sequence
  Artificially Synthesized Peptide
LTNLLSSNL

SEQ ID NO: 2971 - protein, 9 aa, Artificial Sequence
  Artificially Synthesized Peptide
LTRILTIPQ

SEQ ID NO: 2972 - protein, 9 aa, Artificial Sequence
  Artificially Synthesized Peptide
LVDKNPHNT

SEQ ID NO: 2973 - protein, 9 aa, Artificial Sequence
  Artificially Synthesized Peptide
LVSFGVWIR

SEQ ID NO: 2974 - protein, 9 aa, Artificial Sequence
  Artificially Synthesized Peptide
LVVDFSQFS

SEQ ID NO: 2975 - protein, 9 aa, Artificial Sequence
  Artificially Synthesized Peptide
LWFHISCLT

SEQ ID NO: 2976 - protein, 9 aa, Artificial Sequence
  Artificially Synthesized Peptide
LWGMDIDPY

SEQ ID NO: 2977 - protein, 9 aa, Artificial Sequence
  Artificially Synthesized Peptide
LWKAGILYK

SEQ ID NO: 2978 - protein, 9 aa, Artificial Sequence
  Artificially Synthesized Peptide
LYREALESP

SEQ ID NO: 2979 - protein, 9 aa, Artificial Sequence
  Artificially Synthesized Peptide
LYSHPIILG

SEQ ID NO: 2980 - protein, 9 aa, Artificial Sequence
  Artificially Synthesized Peptide
MDDVVLGAK

SEQ ID NO: 2981 - protein, 9 aa, Artificial Sequence
  Artificially Synthesized Peptide
MGVGLSPFL

SEQ ID NO: 2982 - protein, 9 aa, Artificial Sequence
  Artificially Synthesized Peptide
MPHLLVGSS

SEQ ID NO: 2983 - protein, 9 aa, Artificial Sequence
  Artificially Synthesized Peptide
MQWNSTTFH

SEQ ID NO: 2984 - protein, 9 aa, Artificial Sequence
  Artificially Synthesized Peptide
MSTTDLEAY

SEQ ID NO: 2985 - protein, 9 aa, Artificial Sequence
  Artificially Synthesized Peptide
MWYWGPSLY

SEQ ID NO: 2986 - protein, 9 aa, Artificial Sequence
  Artificially Synthesized Peptide
VCAFSSAGP

SEQ ID NO: 2987 - protein, 9 aa, Artificial Sequence
  Artificially Synthesized Peptide
VCQRIVGLL

SEQ ID NO: 2988 - protein, 9 aa, Artificial Sequence
  Artificially Synthesized Peptide
VFADATPTG

SEQ ID NO: 2989 - protein, 9 aa, Artificial Sequence
  Artificially Synthesized Peptide
VGLSPTVWL

SEQ ID NO: 2990 - protein, 9 aa, Artificial Sequence
  Artificially Synthesized Peptide
VGPLTVNEK

SEQ ID NO: 2991 - protein, 9 aa, Artificial Sequence
  Artificially Synthesized Peptide
VHFASPLHV

SEQ ID NO: 2992 - protein, 9 aa, Artificial Sequence
  Artificially Synthesized Peptide
VLCLRPVGA

SEQ ID NO: 2993 - protein, 9 aa, Artificial Sequence
  Artificially Synthesized Peptide
VLGAKSVQH

SEQ ID NO: 2994 - protein, 9 aa, Artificial Sequence
  Artificially Synthesized Peptide
VLHKRTLGL

SEQ ID NO: 2995 - protein, 9 aa, Artificial Sequence
  Artificially Synthesized Peptide
VPNLQSLTN

SEQ ID NO: 2996 - protein, 9 aa, Artificial Sequence
  Artificially Synthesized Peptide
VQASKLCLG

SEQ ID NO: 2997 - protein, 9 aa, Artificial Sequence
  Artificially Synthesized Peptide
VRFSWLSLL

SEQ ID NO: 2998 - protein, 9 aa, Artificial Sequence
  Artificially Synthesized Peptide
VRRAFPHCL

SEQ ID NO: 2999 - protein, 9 aa, Artificial Sequence
  Artificially Synthesized Peptide
VSIPWTHKV

SEQ ID NO: 3000 - protein, 9 aa, Artificial Sequence
  Artificially Synthesized Peptide
VWIRTPPAY

SEQ ID NO: 3001 - protein, 9 aa, Artificial Sequence
  Artificially Synthesized Peptide
VYVPSALNP

SEQ ID NO: 3002 - protein, 9 aa, Artificial Sequence
  Artificially Synthesized Peptide
WFHISCLTF

SEQ ID NO: 3003 - protein, 9 aa, Artificial Sequence
  Artificially Synthesized Peptide
WFVGLSPTV

SEQ ID NO: 3004 - protein, 9 aa, Artificial Sequence
  Artificially Synthesized Peptide
WILRGTSFV

SEQ ID NO: 3005 - protein, 9 aa, Artificial Sequence
  Artificially Synthesized Peptide
WIRTPPAYR

SEQ ID NO: 3006 - protein, 9 aa, Artificial Sequence
  Artificially Synthesized Peptide
WKAGILYKR

SEQ ID NO: 3007 - protein, 9 aa, Artificial Sequence
  Artificially Synthesized Peptide
WLLGCAANW

SEQ ID NO: 3008 - protein, 9 aa, Artificial Sequence
  Artificially Synthesized Peptide
WLSLDVSAA

SEQ ID NO: 3009 - protein, 9 aa, Artificial Sequence
  Artificially Synthesized Peptide
WLSLLVPFV

SEQ ID NO: 3010 - protein, 9 aa, Artificial Sequence
  Artificially Synthesized Peptide
WPKFAVPNL

SEQ ID NO: 3011 - protein, 9 aa, Artificial Sequence
  Artificially Synthesized Peptide
YMDDVVLGA

SEQ ID NO: 3012 - protein, 9 aa, Artificial Sequence
  Artificially Synthesized Peptide
YPALMPLYA

SEQ ID NO: 3013 - protein, 9 aa, Artificial Sequence
  Artificially Synthesized Peptide
YQGMLPVCP

SEQ ID NO: 3014 - protein, 9 aa, Artificial Sequence
  Artificially Synthesized Peptide
YRPPNAPIL

SEQ ID NO: 3015 - protein, 9 aa, Artificial Sequence
  Artificially Synthesized Peptide
YRWMCLRRF

SEQ ID NO: 3016 - protein, 9 aa, Artificial Sequence
  Artificially Synthesized Peptide
YSHPIILGF

SEQ ID NO: 3017 - protein, 9 aa, Artificial Sequence
  Artificially Synthesized Peptide
YSLNFMGYV

SEQ ID NO: 3018 - protein, 9 aa, Artificial Sequence
  Artificially Synthesized Peptide
YVPSALNPA

SEQ ID NO: 3019 - protein, 9 aa, Artificial Sequence
  Artificially Synthesized Peptide
FFCLWVYIZ

SEQ ID NO: 3020 - protein, 9 aa, Artificial Sequence
  Artificially Synthesized Peptide
MGTNLSVPN

SEQ ID NO: 3021 - protein, 15 aa, Artificial Sequence
  Artificially Synthesized Peptide
LLGFAAPFTQCGYPA

SEQ ID NO: 3022 - protein, 15 aa, Artificial Sequence
  Artificially Synthesized Peptide
CQVFADATPTGWGLA

SEQ ID NO: 3023 - protein, 15 aa, Artificial Sequence
  Artificially Synthesized Peptide
WPKFAVPNLQSLTNL

SEQ ID NO: 3024 - protein, 15 aa, Artificial Sequence
  Artificially Synthesized Peptide
CLTFGRETVLEYLVS

SEQ ID NO: 3025 - protein, 15 aa, Artificial Sequence
  Artificially Synthesized Peptide
RRSFGVEPSGSGHID

SEQ ID NO: 3026 - protein, 15 aa, Artificial Sequence
  Artificially Synthesized Peptide
LLWFHISCLTFGRET

SEQ ID NO: 3027 - protein, 15 aa, Artificial Sequence
  Artificially Synthesized Peptide
MQLFHLCLIISCSCP

SEQ ID NO: 3028 - protein, 15 aa, Artificial Sequence
  Artificially Synthesized Peptide
IFLFILLLCLIFLLV

SEQ ID NO: 3029 - protein, 15 aa, Artificial Sequence
  Artificially Synthesized Peptide
FIIFLFILLLCLIFL

SEQ ID NO: 3030 - protein, 15 aa, Artificial Sequence
  Artificially Synthesized Peptide
TSGFLGPLLVLQAGF

SEQ ID NO: 3031 - protein, 15 aa, Artificial Sequence
  Artificially Synthesized Peptide
AGFFLLTRILTIPQS

SEQ ID NO: 3032 - protein, 15 aa, Artificial Sequence
  Artificially Synthesized Peptide
CLIFLLVLLDYQGML

SEQ ID NO: 3033 - protein, 15 aa, Artificial Sequence
  Artificially Synthesized Peptide
GLYFPAGGSSSGTVN

SEQ ID NO: 3034 - protein, 15 aa, Artificial Sequence
  Artificially Synthesized Peptide
LGFFPDHQLDPAFGA

SEQ ID NO: 3035 - protein, 15 aa, Artificial Sequence
  Artificially Synthesized Peptide
RRAFPHCLAFSYMDD

SEQ ID NO: 3036 - protein, 15 aa, Artificial Sequence
  Artificially Synthesized Peptide
ILGFRKIPMGVGLSP

SEQ ID NO: 3037 - protein, 15 aa, Artificial Sequence
  Artificially Synthesized Peptide
KQCFRKLPVNRPIDW

SEQ ID NO: 3038 - protein, 15 aa, Artificial Sequence
  Artificially Synthesized Peptide
VCAFSSAGPCALRFT

SEQ ID NO: 3039 - protein, 15 aa, Artificial Sequence
  Artificially Synthesized Peptide
SVRFSWLSLLVPFVQ

SEQ ID NO: 3040 - protein, 15 aa, Artificial Sequence
  Artificially Synthesized Peptide
KQAFTFSPTYKAFLC

SEQ ID NO: 3041 - protein, 15 aa, Artificial Sequence
  Artificially Synthesized Peptide
VGNFTGLYSSTVPVF

SEQ ID NO: 3042 - protein, 15 aa, Artificial Sequence
  Artificially Synthesized Peptide
LAQFTSAICSVVRRA

SEQ ID NO: 3043 - protein, 15 aa, Artificial Sequence
  Artificially Synthesized Peptide
VQWFVGLSPTVWLSV

SEQ ID NO: 3044 - protein, 15 aa, Artificial Sequence
  Artificially Synthesized Peptide
LKVFVLGGCRHKLVC

SEQ ID NO: 3045 - protein, 15 aa, Artificial Sequence
  Artificially Synthesized Peptide
LVPFVQWFVGLSPTV

SEQ ID NO: 3046 - protein, 15 aa, Artificial Sequence
  Artificially Synthesized Peptide
GTSFVYVPSALNPAD

SEQ ID NO: 3047 - protein, 15 aa, Artificial Sequence
  Artificially Synthesized Peptide
NRPIDWKVCQRIVGL

SEQ ID NO: 3048 - protein, 15 aa, Artificial Sequence
  Artificially Synthesized Peptide
RFIIFLFILLLCLIF

SEQ ID NO: 3049 - protein, 15 aa, Artificial Sequence
  Artificially Synthesized Peptide
LCLIFLLVLLDYQGM

SEQ ID NO: 3050 - protein, 15 aa, Artificial Sequence
  Artificially Synthesized Peptide
AKLIGTDNSVVLSRK

SEQ ID NO: 3051 - protein, 15 aa, Artificial Sequence
  Artificially Synthesized Peptide
PLPIHTAELLAACFA

SEQ ID NO: 3052 - protein, 15 aa, Artificial Sequence
  Artificially Synthesized Peptide
RRFIIFLFILLLCLI

SEQ ID NO: 3053 - protein, 15 aa, Artificial Sequence
  Artificially Synthesized Peptide
FLFILLLCLIFLLVL

SEQ ID NO: 3054 - protein, 15 aa, Artificial Sequence
  Artificially Synthesized Peptide
ANWILRGTSFVYVPS

SEQ ID NO: 3055 - protein, 15 aa, Artificial Sequence
  Artificially Synthesized Peptide
NAPILSTLPETTVVR

SEQ ID NO: 3056 - protein, 15 aa, Artificial Sequence
  Artificially Synthesized Peptide
CTCIPIPSSWAFARF

SEQ ID NO: 3057 - protein, 15 aa, Artificial Sequence
  Artificially Synthesized Peptide
GVWIRTPPAYRPPNA

SEQ ID NO: 3058 - protein, 15 aa, Artificial Sequence
  Artificially Synthesized Peptide
AELLAACFARSRSGA

SEQ ID NO: 3059 - protein, 15 aa, Artificial Sequence
  Artificially Synthesized Peptide
PHCLAFSYMDDVVLG

SEQ ID NO: 3060 - protein, 15 aa, Artificial Sequence
  Artificially Synthesized Peptide
PFLLAQFTSAICSVV

SEQ ID NO: 3061 - protein, 15 aa, Artificial Sequence
  Artificially Synthesized Peptide
ASKLCLGWLWGMDID

SEQ ID NO: 3062 - protein, 15 aa, Artificial Sequence
  Artificially Synthesized Peptide
ILLLCLIFLLVLLDY

SEQ ID NO: 3063 - protein, 15 aa, Artificial Sequence
  Artificially Synthesized Peptide
RDVLCLRPVGAESRG

SEQ ID NO: 3064 - protein, 15 aa, Artificial Sequence
  Artificially Synthesized Peptide
RPGLCQVFADATPTG

SEQ ID NO: 3065 - protein, 15 aa, Artificial Sequence
  Artificially Synthesized Peptide
PQSLDSWWTSLNFLG

SEQ ID NO: 3066 - protein, 15 aa, Artificial Sequence
  Artificially Synthesized Peptide
RDLLDTASALYREAL

SEQ ID NO: 3067 - protein, 15 aa, Artificial Sequence
  Artificially Synthesized Peptide
WLSLDVSAAFYHIPL

SEQ ID NO: 3068 - protein, 15 aa, Artificial Sequence
  Artificially Synthesized Peptide
LVLLDYQGMLPVCPL

SEQ ID NO: 3069 - protein, 15 aa, Artificial Sequence
  Artificially Synthesized Peptide
AGPLEEELPRLADEG

SEQ ID NO: 3070 - protein, 15 aa, Artificial Sequence
  Artificially Synthesized Peptide
IIFLFILLLCLIFLL

SEQ ID NO: 3071 - protein, 15 aa, Artificial Sequence
  Artificially Synthesized Peptide
DVVLGAKSVQHLESL

SEQ ID NO: 3072 - protein, 15 aa, Artificial Sequence
  Artificially Synthesized Peptide
VGLLGFAAPFTQCGY

SEQ ID NO: 3073 - protein, 15 aa, Artificial Sequence
  Artificially Synthesized Peptide
PIILGFRKIPMGVGL

SEQ ID NO: 3074 - protein, 15 aa, Artificial Sequence
  Artificially Synthesized Peptide
DLNLGNLNVSIPWTH

SEQ ID NO: 3075 - protein, 15 aa, Artificial Sequence
  Artificially Synthesized Peptide
SGFLGPLLVLQAGFF

SEQ ID NO: 3076 - protein, 15 aa, Artificial Sequence
  Artificially Synthesized Peptide
HLPLHPAAMPHLLVG

SEQ ID NO: 3077 - protein, 15 aa, Artificial Sequence
  Artificially Synthesized Peptide
LLCLIFLLVLLDYQG

SEQ ID NO: 3078 - protein, 15 aa, Artificial Sequence
  Artificially Synthesized Peptide
KRRLKLIMPARFYPN

SEQ ID NO: 3079 - protein, 15 aa, Artificial Sequence
  Artificially Synthesized Peptide
EIRLKVFVLGGCRHK

SEQ ID NO: 3080 - protein, 15 aa, Artificial Sequence
  Artificially Synthesized Peptide
SPFLLAQFTSAICSV

SEQ ID NO: 3081 - protein, 15 aa, Artificial Sequence
  Artificially Synthesized Peptide
IRDLLDTASALYREA

SEQ ID NO: 3082 - protein, 15 aa, Artificial Sequence
  Artificially Synthesized Peptide
FPWLLGCAANWILRG

SEQ ID NO: 3083 - protein, 15 aa, Artificial Sequence
  Artificially Synthesized Peptide
IVGLLGFAAPFTQCG

SEQ ID NO: 3084 - protein, 15 aa, Artificial Sequence
  Artificially Synthesized Peptide
HGGLLGWSPQAQGIL

SEQ ID NO: 3085 - protein, 15 aa, Artificial Sequence
  Artificially Synthesized Peptide
LFILLLCLIFLLVLL

SEQ ID NO: 3086 - protein, 15 aa, Artificial Sequence
  Artificially Synthesized Peptide
SVELLSFLPSDFFPS

SEQ ID NO: 3087 - protein, 15 aa, Artificial Sequence
  Artificially Synthesized Peptide
TNFLLSLGIHLNPNK

SEQ ID NO: 3088 - protein, 15 aa, Artificial Sequence
  Artificially Synthesized Peptide
LTNLLSSNLSWLSLD

SEQ ID NO: 3089 - protein, 15 aa, Artificial Sequence
  Artificially Synthesized Peptide
GFFLLTRILTIPQSL

SEQ ID NO: 3090 - protein, 15 aa, Artificial Sequence
  Artificially Synthesized Peptide
LGPLLVLQAGFFLLT

SEQ ID NO: 3091 - protein, 15 aa, Artificial Sequence
  Artificially Synthesized Peptide
WLSLLVPFVQWFVGL

SEQ ID NO: 3092 - protein, 15 aa, Artificial Sequence
  Artificially Synthesized Peptide
IRQLLWFHISCLTFG

SEQ ID NO: 3093 - protein, 15 aa, Artificial Sequence
  Artificially Synthesized Peptide
YPALMPLYACIQSKQ

SEQ ID NO: 3094 - protein, 15 aa, Artificial Sequence
  Artificially Synthesized Peptide
AEDLNLGNLNVSIPW

SEQ ID NO: 3095 - protein, 15 aa, Artificial Sequence
  Artificially Synthesized Peptide
GIHLNPNKTKRWGYS

SEQ ID NO: 3096 - protein, 15 aa, Artificial Sequence
  Artificially Synthesized Peptide
DEGLNRRVAEDLNLG

SEQ ID NO: 3097 - protein, 15 aa, Artificial Sequence
  Artificially Synthesized Peptide
LGNLNVSIPWTHKVG

SEQ ID NO: 3098 - protein, 15 aa, Artificial Sequence
  Artificially Synthesized Peptide
LSTLPETTVVRRRGR

SEQ ID NO: 3099 - protein, 15 aa, Artificial Sequence
  Artificially Synthesized Peptide
LPLLPIFFCLWVYIZ

SEQ ID NO: 3100 - protein, 15 aa, Artificial Sequence
  Artificially Synthesized Peptide
VAPLPIHTAELLAAC

SEQ ID NO: 3101 - protein, 15 aa, Artificial Sequence
  Artificially Synthesized Peptide
FRKLPVNRPIDWKVC

SEQ ID NO: 3102 - protein, 15 aa, Artificial Sequence
  Artificially Synthesized Peptide
CWWLQFRNSKPCSDY

SEQ ID NO: 3103 - protein, 15 aa, Artificial Sequence
  Artificially Synthesized Peptide
HLSLRGLPVCAFSSA

SEQ ID NO: 3104 - protein, 15 aa, Artificial Sequence
  Artificially Synthesized Peptide
VLCLRPVGAESRGRP

SEQ ID NO: 3105 - protein, 15 aa, Artificial Sequence
  Artificially Synthesized Peptide
HTALRQAILCWGELM

SEQ ID NO: 3106 - protein, 15 aa, Artificial Sequence
  Artificially Synthesized Peptide
WMCLRRFIIFLFILL

SEQ ID NO: 3107 - protein, 15 aa, Artificial Sequence
  Artificially Synthesized Peptide
VELLSFLPSDFFPSI

SEQ ID NO: 3108 - protein, 15 aa, Artificial Sequence
  Artificially Synthesized Peptide
LSWLSLDVSAAFYHI

SEQ ID NO: 3109 - protein, 15 aa, Artificial Sequence
  Artificially Synthesized Peptide
FSWLSLLVPFVQWFV

SEQ ID NO: 3110 - protein, 15 aa, Artificial Sequence
  Artificially Synthesized Peptide
GAHLSLRGLPVCAFS

SEQ ID NO: 3111 - protein, 15 aa, Artificial Sequence
  Artificially Synthesized Peptide
GVGLSPFLLAQFTSA

SEQ ID NO: 3112 - protein, 15 aa, Artificial Sequence
  Artificially Synthesized Peptide
SVVLSRKYTSFPWLL

SEQ ID NO: 3113 - protein, 15 aa, Artificial Sequence
  Artificially Synthesized Peptide
TNLLSSNLSWLSLDV

SEQ ID NO: 3114 - protein, 15 aa, Artificial Sequence
  Artificially Synthesized Peptide
GTNLSVPNPLGFFPD

SEQ ID NO: 3115 - protein, 15 aa, Artificial Sequence
  Artificially Synthesized Peptide
SSNLSWLSLDVSAAF

SEQ ID NO: 3116 - protein, 15 aa, Artificial Sequence
  Artificially Synthesized Peptide
TRILTIPQSLDSWWT

SEQ ID NO: 3117 - protein, 15 aa, Artificial Sequence
  Artificially Synthesized Peptide
LQSLTNLLSSNLSWL

SEQ ID NO: 3118 - protein, 15 aa, Artificial Sequence
  Artificially Synthesized Peptide
FFLLTRILTIPQSLD

SEQ ID NO: 3119 - protein, 15 aa, Artificial Sequence
  Artificially Synthesized Peptide
GVFLVDKNPHNTTES

SEQ ID NO: 3120 - protein, 15 aa, Artificial Sequence
  Artificially Synthesized Peptide
LEYLVSFGVWIRTPP

SEQ ID NO: 3121 - protein, 15 aa, Artificial Sequence
  Artificially Synthesized Peptide
ESRLVVDFSQFSRGN

SEQ ID NO: 3122 - protein, 15 aa, Artificial Sequence
  Artificially Synthesized Peptide
RQLLWFHISCLTFGR

SEQ ID NO: 3123 - protein, 15 aa, Artificial Sequence
  Artificially Synthesized Peptide
LGWLWGMDIDPYKEF

SEQ ID NO: 3124 - protein, 15 aa, Artificial Sequence
  Artificially Synthesized Peptide
LHTLWKAGILYKRET

SEQ ID NO: 3125 - protein, 15 aa, Artificial Sequence
  Artificially Synthesized Peptide
ASALYREALESPEHC

SEQ ID NO: 3126 - protein, 15 aa, Artificial Sequence
  Artificially Synthesized Peptide
KLHLYSHPIILGFRK

SEQ ID NO: 3127 - protein, 15 aa, Artificial Sequence
  Artificially Synthesized Peptide
FSYMDDVVLGAKSVQ

SEQ ID NO: 3128 - protein, 15 aa, Artificial Sequence
  Artificially Synthesized Peptide
KIPMGVGLSPFLLAQ

SEQ ID NO: 3129 - protein, 15 aa, Artificial Sequence
  Artificially Synthesized Peptide
PAAMPHLLVGSSGLS

SEQ ID NO: 3130 - protein, 15 aa, Artificial Sequence
  Artificially Synthesized Peptide
PQAMQWNSTTFHQTL

SEQ ID NO: 3131 - protein, 15 aa, Artificial Sequence
  Artificially Synthesized Peptide
LSAMSTTDLEAYFKD

SEQ ID NO: 3132 - protein, 15 aa, Artificial Sequence
  Artificially Synthesized Peptide
IWMMWYWGPSLYNIL

SEQ ID NO: 3133 - protein, 15 aa, Artificial Sequence
  Artificially Synthesized Peptide
GLPVCAFSSAGPCAL

SEQ ID NO: 3134 - protein, 15 aa, Artificial Sequence
  Artificially Synthesized Peptide
DWKVCQRIVGLLGFA

SEQ ID NO: 3135 - protein, 15 aa, Artificial Sequence
  Artificially Synthesized Peptide
LCQVFADATPTGWGL

SEQ ID NO: 3136 - protein, 15 aa, Artificial Sequence
  Artificially Synthesized Peptide
QWFVGLSPTVWLSVI

SEQ ID NO: 3137 - protein, 15 aa, Artificial Sequence
  Artificially Synthesized Peptide
QQYVGPLTVNEKRRL

SEQ ID NO: 3138 - protein, 15 aa, Artificial Sequence
  Artificially Synthesized Peptide
PDRVHFASPLHVAWR

SEQ ID NO: 3139 - protein, 15 aa, Artificial Sequence
  Artificially Synthesized Peptide
ARDVLCLRPVGAESR

SEQ ID NO: 3140 - protein, 15 aa, Artificial Sequence
  Artificially Synthesized Peptide
DDVVLGAKSVQHLES

SEQ ID NO: 3141 - protein, 15 aa, Artificial Sequence
  Artificially Synthesized Peptide
LPKVLHKRTLGLSAM

SEQ ID NO: 3142 - protein, 15 aa, Artificial Sequence
  Artificially Synthesized Peptide
KFAVPNLQSLTNLLS

SEQ ID NO: 3143 - protein, 15 aa, Artificial Sequence
  Artificially Synthesized Peptide
CPTVQASKLCLGWLW

SEQ ID NO: 3144 - protein, 15 aa, Artificial Sequence
  Artificially Synthesized Peptide
WASVRFSWLSLLVPF

SEQ ID NO: 3145 - protein, 15 aa, Artificial Sequence
  Artificially Synthesized Peptide
CSVVRRAFPHCLAFS

SEQ ID NO: 3146 - protein, 15 aa, Artificial Sequence
  Artificially Synthesized Peptide
NLNVSIPWTHKVGNF

SEQ ID NO: 3147 - protein, 15 aa, Artificial Sequence
  Artificially Synthesized Peptide
SFGVWIRTPPAYRPP

SEQ ID NO: 3148 - protein, 15 aa, Artificial Sequence
  Artificially Synthesized Peptide
TSFVYVPSALNPADD

SEQ ID NO: 3149 - protein, 15 aa, Artificial Sequence
  Artificially Synthesized Peptide
QLLWFHISCLTFGRE

SEQ ID NO: 3150 - protein, 15 aa, Artificial Sequence
  Artificially Synthesized Peptide
FVQWFVGLSPTVWLS

SEQ ID NO: 3151 - protein, 15 aa, Artificial Sequence
  Artificially Synthesized Peptide
AANWILRGTSFVYVP

SEQ ID NO: 3152 - protein, 15 aa, Artificial Sequence
  Artificially Synthesized Peptide
FGVWIRTPPAYRPPN

SEQ ID NO: 3153 - protein, 15 aa, Artificial Sequence
  Artificially Synthesized Peptide
HTLWKAGILYKRETT

SEQ ID NO: 3154 - protein, 15 aa, Artificial Sequence
  Artificially Synthesized Peptide
SFPWLLGCAANWILR

SEQ ID NO: 3155 - protein, 15 aa, Artificial Sequence
  Artificially Synthesized Peptide
NLSWLSLDVSAAFYH

SEQ ID NO: 3156 - protein, 15 aa, Artificial Sequence
  Artificially Synthesized Peptide
RFSWLSLLVPFVQWF

SEQ ID NO: 3157 - protein, 15 aa, Artificial Sequence
  Artificially Synthesized Peptide
RVSWPKFAVPNLQSL

SEQ ID NO: 3158 - protein, 15 aa, Artificial Sequence
  Artificially Synthesized Peptide
AFSYMDDVVLGAKSV

SEQ ID NO: 3159 - protein, 15 aa, Artificial Sequence
  Artificially Synthesized Peptide
QCGYPALMPLYACIQ

SEQ ID NO: 3160 - protein, 15 aa, Artificial Sequence
  Artificially Synthesized Peptide
LLDYQGMLPVCPLIP

SEQ ID NO: 3161 - protein, 15 aa, Artificial Sequence
  Artificially Synthesized Peptide
PPAYRPPNAPILSTL

SEQ ID NO: 3162 - protein, 15 aa, Artificial Sequence
  Artificially Synthesized Peptide
CPGYRWMCLRRFIIF

SEQ ID NO: 3163 - protein, 15 aa, Artificial Sequence
  Artificially Synthesized Peptide
LHLYSHPIILGFRKI

SEQ ID NO: 3164 - protein, 15 aa, Artificial Sequence
  Artificially Synthesized Peptide
RWGYSLNFMGYVIGS

SEQ ID NO: 3165 - protein, 15 aa, Artificial Sequence
  Artificially Synthesized Peptide
SFVYVPSALNPADDP

SEQ ID NO: 3166 - protein, 9 aa, Artificial Sequence
  Artificially Synthesized Peptide
FFPDHQLDP

SEQ ID NO: 3167 - protein, 9 aa, Artificial Sequence
  Artificially Synthesized Peptide
FGRETVLEY

SEQ ID NO: 3168 - protein, 9 aa, Artificial Sequence
  Artificially Synthesized Peptide
FGVEPSGSG

SEQ ID NO: 3169 - protein, 9 aa, Artificial Sequence
  Artificially Synthesized Peptide
FLVDKNPHN

SEQ ID NO: 3170 - protein, 9 aa, Artificial Sequence
  Artificially Synthesized Peptide
IGTDNSVVL

SEQ ID NO: 3171 - protein, 9 aa, Artificial Sequence
  Artificially Synthesized Peptide
LEEELPRLA

SEQ ID NO: 3172 - protein, 9 aa, Artificial Sequence
  Artificially Synthesized Peptide
LPLDKGIKP

SEQ ID NO: 3173 - protein, 9 aa, Artificial Sequence
  Artificially Synthesized Peptide
LSLDVSAAF

SEQ ID NO: 3174 - protein, 9 aa, Artificial Sequence
  Artificially Synthesized Peptide
LVVDFSQFS

SEQ ID NO: 3175 - protein, 9 aa, Artificial Sequence
  Artificially Synthesized Peptide
LYREALESP

SEQ ID NO: 3176 - protein, 9 aa, Artificial Sequence
  Artificially Synthesized Peptide
MDIDPYKEF

SEQ ID NO: 3177 - protein, 9 aa, Artificial Sequence
  Artificially Synthesized Peptide
VAEDLNLGN

SEQ ID NO: 3178 - protein, 9 aa, Artificial Sequence
  Artificially Synthesized Peptide
VFADATPTG

SEQ ID NO: 3179 - protein, 9 aa, Artificial Sequence
  Artificially Synthesized Peptide
VLLDYQGML

SEQ ID NO: 3180 - protein, 9 aa, Artificial Sequence
  Artificially Synthesized Peptide
YMDDVVLGA

SEQ ID NO: 3181 - protein, 15 aa, Artificial Sequence
  Artificially Synthesized Peptide
PLGFFPDHQLDPAFG

SEQ ID NO: 3182 - protein, 15 aa, Artificial Sequence
  Artificially Synthesized Peptide
CLTFGRETVLEYLVS

SEQ ID NO: 3183 - protein, 15 aa, Artificial Sequence
  Artificially Synthesized Peptide
RRSFGVEPSGSGHID

SEQ ID NO: 3184 - protein, 15 aa, Artificial Sequence
  Artificially Synthesized Peptide
GGVFLVDKNPHNTTE

SEQ ID NO: 3185 - protein, 15 aa, Artificial Sequence
  Artificially Synthesized Peptide
AKLIGTDNSVVLSRK

SEQ ID NO: 3186 - protein, 15 aa, Artificial Sequence
  Artificially Synthesized Peptide
AGPLEEELPRLADEG

SEQ ID NO: 3187 - protein, 15 aa, Artificial Sequence
  Artificially Synthesized Peptide
TKYLPLDKGIKPYYP

SEQ ID NO: 3188 - protein, 15 aa, Artificial Sequence
  Artificially Synthesized Peptide
LSWLSLDVSAAFYHI

SEQ ID NO: 3189 - protein, 15 aa, Artificial Sequence
  Artificially Synthesized Peptide
ESRLVVDFSQFSRGN

SEQ ID NO: 3190 - protein, 15 aa, Artificial Sequence
  Artificially Synthesized Peptide
ASALYREALESPEHC

SEQ ID NO: 3191 - protein, 15 aa, Artificial Sequence
  Artificially Synthesized Peptide
LWGMDIDPYKEFGAS

SEQ ID NO: 3192 - protein, 15 aa, Artificial Sequence
  Artificially Synthesized Peptide
NRRVAEDLNLGNLNV

SEQ ID NO: 3193 - protein, 15 aa, Artificial Sequence
  Artificially Synthesized Peptide
LCQVFADATPTGWGL

SEQ ID NO: 3194 - protein, 15 aa, Artificial Sequence
  Artificially Synthesized Peptide
FLLVLLDYQGMLPVC

SEQ ID NO: 3195 - protein, 15 aa, Artificial Sequence
  Artificially Synthesized Peptide
AFSYMDDVVLGAKSV

SEQ ID NO: 3196 - protein, 9 aa, Artificial Sequence
  Artificially Synthesized Peptide
AHLSLRGLP

SEQ ID NO: 3197 - protein, 9 aa, Artificial Sequence
  Artificially Synthesized Peptide
FSPTYKAFL

SEQ ID NO: 3198 - protein, 9 aa, Artificial Sequence
  Artificially Synthesized Peptide
IPWTHKVGN

SEQ ID NO: 3199 - protein, 9 aa, Artificial Sequence
  Artificially Synthesized Peptide
LTVNEKRRL

SEQ ID NO: 3200 - protein, 9 aa, Artificial Sequence
  Artificially Synthesized Peptide
VGAESRGRP

SEQ ID NO: 3201 - protein, 9 aa, Artificial Sequence
  Artificially Synthesized Peptide
VVLSRKYTS

SEQ ID NO: 3202 - protein, 15 aa, Artificial Sequence
  Artificially Synthesized Peptide
DHGAHLSLRGLPVCA

SEQ ID NO: 3203 - protein, 15 aa, Artificial Sequence
  Artificially Synthesized Peptide
AFTFSPTYKAFLCKQ

SEQ ID NO: 3204 - protein, 15 aa, Artificial Sequence
  Artificially Synthesized Peptide
NVSIPWTHKVGNFTG

SEQ ID NO: 3205 - protein, 15 aa, Artificial Sequence
  Artificially Synthesized Peptide
VGPLTVNEKRRLKLI

SEQ ID NO: 3206 - protein, 15 aa, Artificial Sequence
  Artificially Synthesized Peptide
LRPVGAESRGRPVSG

SEQ ID NO: 3207 - protein, 15 aa, Artificial Sequence
  Artificially Synthesized Peptide
DNSVVLSRKYTSFPW

SEQ ID NO: 3208 - protein, 10 aa, Artificial Sequence
  Artificially Synthesized Peptide
CILLLCLIFL

SEQ ID NO: 3209 - protein, 9 aa, Artificial Sequence
  Artificially Synthesized Peptide
RMTGGVFLV

SEQ ID NO: 3210 - protein, 9 aa, Artificial Sequence
  Artificially Synthesized Peptide
LMPFVQWFV

SEQ ID NO: 3211 - protein, 9 aa, Artificial Sequence
  Artificially Synthesized Peptide
RLTGGVFLV

SEQ ID NO: 3212 - protein, 9 aa, Artificial Sequence
  Artificially Synthesized Peptide
GLCQVFADV

SEQ ID NO: 3213 - protein, 9 aa, Artificial Sequence
  Artificially Synthesized Peptide
WLLRGTSFV

SEQ ID NO: 3214 - protein, 9 aa, Artificial Sequence
  Artificially Synthesized Peptide
NLGNLNVSV

SEQ ID NO: 3215 - protein, 9 aa, Artificial Sequence
  Artificially Synthesized Peptide
YLPSALNPV

SEQ ID NO: 3216 - protein, 9 aa, Artificial Sequence
  Artificially Synthesized Peptide
GLWIRTPPV

SEQ ID NO: 3217 - protein, 9 aa, Artificial Sequence
  Artificially Synthesized Peptide
RLSWPKFAV

SEQ ID NO: 3218 - protein, 9 aa, Artificial Sequence
  Artificially Synthesized Peptide
ILGLLGFAV

SEQ ID NO: 3219 - protein, 9 aa, Artificial Sequence
  Artificially Synthesized Peptide
RMLTIPQSV

SEQ ID NO: 3220 - protein, 9 aa, Artificial Sequence
  Artificially Synthesized Peptide
SLDSWWTSV

SEQ ID NO: 3221 - protein, 10 aa, Artificial Sequence
  Artificially Synthesized Peptide
FMLLLCLIFL

SEQ ID NO: 3222 - protein, 10 aa, Artificial Sequence
  Artificially Synthesized Peptide
LMLQAGFFLV

SEQ ID NO: 3223 - protein, 10 aa, Artificial Sequence
  Artificially Synthesized Peptide
SMLSPFLPLV

SEQ ID NO: 3224 - protein, 10 aa, Artificial Sequence
  Artificially Synthesized Peptide
LMLLDYQGMV

SEQ ID NO: 3225 - protein, 10 aa, Artificial Sequence
  Artificially Synthesized Peptide
FLGLSPTVWV

SEQ ID NO: 3226 - protein, 8 aa, Artificial Sequence
  Artificially Synthesized Peptide
FPAAMPHL

SEQ ID NO: 3227 - protein, 8 aa, Artificial Sequence
  Artificially Synthesized Peptide
HPFAMPHL

SEQ ID NO: 3228 - protein, 8 aa, Artificial Sequence
  Artificially Synthesized Peptide
HPAAMPHI

SEQ ID NO: 3229 - protein, 8 aa, Artificial Sequence
  Artificially Synthesized Peptide
FMFSPTYK

SEQ ID NO: 3230 - protein, 8 aa, Artificial Sequence
  Artificially Synthesized Peptide
FVFSPTYK

SEQ ID NO: 3231 - protein, 9 aa, Artificial Sequence
  Artificially Synthesized Peptide
FLLTRILTV

SEQ ID NO: 3232 - protein, 9 aa, Artificial Sequence
  Artificially Synthesized Peptide
ALMPLYACV

SEQ ID NO: 3233 - protein, 9 aa, Artificial Sequence
  Artificially Synthesized Peptide
LLAQFTSAV

SEQ ID NO: 3234 - protein, 9 aa, Artificial Sequence
  Artificially Synthesized Peptide
LLPFVQWFV

SEQ ID NO: 3235 - protein, 9 aa, Artificial Sequence
  Artificially Synthesized Peptide
FLLAQFTSV

SEQ ID NO: 3236 - protein, 9 aa, Artificial Sequence
  Artificially Synthesized Peptide
KLHLYSHPV

SEQ ID NO: 3237 - protein, 9 aa, Artificial Sequence
  Artificially Synthesized Peptide
KLFLYSHPI

SEQ ID NO: 3238 - protein, 9 aa, Artificial Sequence
  Artificially Synthesized Peptide
LLSSNLSWV

SEQ ID NO: 3239 - protein, 9 aa, Artificial Sequence
  Artificially Synthesized Peptide
FLLSLGIHV

SEQ ID NO: 3240 - protein, 9 aa, Artificial Sequence
  Artificially Synthesized Peptide
MMWYWGPSV

SEQ ID NO: 3241 - protein, 9 aa, Artificial Sequence
  Artificially Synthesized Peptide
VLQAGFFLV

SEQ ID NO: 3242 - protein, 9 aa, Artificial Sequence
  Artificially Synthesized Peptide
PLLPIFFCV

SEQ ID NO: 3243 - protein, 9 aa, Artificial Sequence
  Artificially Synthesized Peptide
FLLPIFFCL

SEQ ID NO: 3244 - protein, 9 aa, Artificial Sequence
  Artificially Synthesized Peptide
VLLDYQGMV

SEQ ID NO: 3245 - protein, 9 aa, Artificial Sequence
  Artificially Synthesized Peptide
YMFDVVLGA

SEQ ID NO: 3246 - protein, 9 aa, Artificial Sequence
  Artificially Synthesized Peptide
GLLGWSPQV

SEQ ID NO: 3247 - protein, 9 aa, Artificial Sequence
  Artificially Synthesized Peptide
FPAAMPHLL

SEQ ID NO: 3248 - protein, 9 aa, Artificial Sequence
  Artificially Synthesized Peptide
HPFAMPHLL

SEQ ID NO: 3249 - protein, 9 aa, Artificial Sequence
  Artificially Synthesized Peptide
HPAAMPHLI

SEQ ID NO: 3250 - protein, 9 aa, Artificial Sequence
  Artificially Synthesized Peptide
FPVCAFSSA

SEQ ID NO: 3251 - protein, 9 aa, Artificial Sequence
  Artificially Synthesized Peptide
LPFCAFSSA

SEQ ID NO: 3252 - protein, 9 aa, Artificial Sequence
  Artificially Synthesized Peptide
LPVCAFSSI

SEQ ID NO: 3253 - protein, 9 aa, Artificial Sequence
  Artificially Synthesized Peptide
FPALMPLYA

SEQ ID NO: 3254 - protein, 9 aa, Artificial Sequence
  Artificially Synthesized Peptide
YPFLMPLYA

SEQ ID NO: 3255 - protein, 9 aa, Artificial Sequence
  Artificially Synthesized Peptide
YPALMPLYI

SEQ ID NO: 3256 - protein, 9 aa, Artificial Sequence
  Artificially Synthesized Peptide
FPSRGRLGL

SEQ ID NO: 3257 - protein, 9 aa, Artificial Sequence
  Artificially Synthesized Peptide
DPFRGRLGL

SEQ ID NO: 3258 - protein, 9 aa, Artificial Sequence
  Artificially Synthesized Peptide
DPSRGRLGI

SEQ ID NO: 3259 - protein, 9 aa, Artificial Sequence
  Artificially Synthesized Peptide
SMICSVVRR

SEQ ID NO: 3260 - protein, 9 aa, Artificial Sequence
  Artificially Synthesized Peptide
SVICSVVRR

SEQ ID NO: 3261 - protein, 9 aa, Artificial Sequence
  Artificially Synthesized Peptide
KVGNFTGLK

SEQ ID NO: 3262 - protein, 9 aa, Artificial Sequence
  Artificially Synthesized Peptide
KVGNFTGLR

SEQ ID NO: 3263 - protein, 9 aa, Artificial Sequence
  Artificially Synthesized Peptide
VVFFSQFSR

SEQ ID NO: 3264 - protein, 9 aa, Artificial Sequence
  Artificially Synthesized Peptide
SVNRPIDWK

SEQ ID NO: 3265 - protein, 9 aa, Artificial Sequence
  Artificially Synthesized Peptide
TLWKAGILK

SEQ ID NO: 3266 - protein, 9 aa, Artificial Sequence
  Artificially Synthesized Peptide
TLWKAGILR

SEQ ID NO: 3267 - protein, 9 aa, Artificial Sequence
  Artificially Synthesized Peptide
TMWKAGILY

SEQ ID NO: 3268 - protein, 9 aa, Artificial Sequence
  Artificially Synthesized Peptide
TVWKAGILY

SEQ ID NO: 3269 - protein, 9 aa, Artificial Sequence
  Artificially Synthesized Peptide
RMYLHTLWK

SEQ ID NO: 3270 - protein, 9 aa, Artificial Sequence
  Artificially Synthesized Peptide
RVYLHTLWK

SEQ ID NO: 3271 - protein, 9 aa, Artificial Sequence
  Artificially Synthesized Peptide
AMTFSPTYK

SEQ ID NO: 3272 - protein, 9 aa, Artificial Sequence
  Artificially Synthesized Peptide
SVVRRAFPR

SEQ ID NO: 3273 - protein, 9 aa, Artificial Sequence
  Artificially Synthesized Peptide
SVVRRAFPK

SEQ ID NO: 3274 - protein, 9 aa, Artificial Sequence
  Artificially Synthesized Peptide
  VARIANT (4)...(4): Xaa = Any Amino Acid
SAIXSVVRR

SEQ ID NO: 3275 - protein, 9 aa, Artificial Sequence
  Artificially Synthesized Peptide
  VARIANT (4)...(4): Xaa = Any Amino Acid
LPVXAFSSA

SEQ ID NO: 3276 - protein, 10 aa, Artificial Sequence
  Artificially Synthesized Peptide
FLLAQFTSAV

SEQ ID NO: 3277 - protein, 10 aa, Artificial Sequence
  Artificially Synthesized Peptide
YLFTLWKAGI

SEQ ID NO: 3278 - protein, 10 aa, Artificial Sequence
  Artificially Synthesized Peptide
YLLTLWKAGI

SEQ ID NO: 3279 - protein, 10 aa, Artificial Sequence
  Artificially Synthesized Peptide
LLFYQGMLPV

SEQ ID NO: 3280 - protein, 10 aa, Artificial Sequence
  Artificially Synthesized Peptide
LLLYQGMLPV

SEQ ID NO: 3281 - protein, 10 aa, Artificial Sequence
  Artificially Synthesized Peptide
LLVLQAGFFV

SEQ ID NO: 3282 - protein, 10 aa, Artificial Sequence
  Artificially Synthesized Peptide
ILLLCLIFLV

SEQ ID NO: 3283 - protein, 10 aa, Artificial Sequence
  Artificially Synthesized Peptide
FPFCLAFSYM

SEQ ID NO: 3284 - protein, 10 aa, Artificial Sequence
  Artificially Synthesized Peptide
FPHCLAFSYI

SEQ ID NO: 3285 - protein, 10 aa, Artificial Sequence
  Artificially Synthesized Peptide
FPARVTGGVF

SEQ ID NO: 3286 - protein, 10 aa, Artificial Sequence
  Artificially Synthesized Peptide
TPFRVTGGVF

SEQ ID NO: 3287 - protein, 10 aa, Artificial Sequence
  Artificially Synthesized Peptide
TPARVTGGVI

SEQ ID NO: 3288 - protein, 10 aa, Artificial Sequence
  Artificially Synthesized Peptide
FPCALRFTSA

SEQ ID NO: 3289 - protein, 10 aa, Artificial Sequence
  Artificially Synthesized Peptide
GPFALRFTSA

SEQ ID NO: 3290 - protein, 10 aa, Artificial Sequence
  Artificially Synthesized Peptide
GPCALRFTSI

SEQ ID NO: 3291 - protein, 10 aa, Artificial Sequence
  Artificially Synthesized Peptide
FPAAMPHLLV

SEQ ID NO: 3292 - protein, 10 aa, Artificial Sequence
  Artificially Synthesized Peptide
HPFAMPHLLV

SEQ ID NO: 3293 - protein, 10 aa, Artificial Sequence
  Artificially Synthesized Peptide
HPAAMPHLLI

SEQ ID NO: 3294 - protein, 10 aa, Artificial Sequence
  Artificially Synthesized Peptide
QMFTFSPTYK

SEQ ID NO: 3295 - protein, 10 aa, Artificial Sequence
  Artificially Synthesized Peptide
QVFTFSPTYK

SEQ ID NO: 3296 - protein, 10 aa, Artificial Sequence
  Artificially Synthesized Peptide
TMWKAGILYK

SEQ ID NO: 3297 - protein, 10 aa, Artificial Sequence
  Artificially Synthesized Peptide
TVWKAGILYK

SEQ ID NO: 3298 - protein, 10 aa, Artificial Sequence
  Artificially Synthesized Peptide
VMGGVFLVDK

SEQ ID NO: 3299 - protein, 10 aa, Artificial Sequence
  Artificially Synthesized Peptide
VVGGVFLVDK

SEQ ID NO: 3300 - protein, 10 aa, Artificial Sequence
  Artificially Synthesized Peptide
SMLPETTVVR

SEQ ID NO: 3301 - protein, 10 aa, Artificial Sequence
  Artificially Synthesized Peptide
SVLPETTVVR

SEQ ID NO: 3302 - protein, 10 aa, Artificial Sequence
  Artificially Synthesized Peptide
TMPETTVVRR

SEQ ID NO: 3303 - protein, 10 aa, Artificial Sequence
  Artificially Synthesized Peptide
TVPETTVVRR

SEQ ID NO: 3304 - protein, 10 aa, Artificial Sequence
  Artificially Synthesized Peptide
HTLWKAGILK

SEQ ID NO: 3305 - protein, 10 aa, Artificial Sequence
  Artificially Synthesized Peptide
HTLWKAGILR

SEQ ID NO: 3306 - protein, 10 aa, Artificial Sequence
  Artificially Synthesized Peptide
HMLWKAGILY

SEQ ID NO: 3307 - protein, 10 aa, Artificial Sequence
  Artificially Synthesized Peptide
HVLWKAGILY

SEQ ID NO: 3308 - protein, 10 aa, Artificial Sequence
  Artificially Synthesized Peptide
GMDNSVVLSR

SEQ ID NO: 3309 - protein, 10 aa, Artificial Sequence
  Artificially Synthesized Peptide
GVDNSVVLSR

SEQ ID NO: 3310 - protein, 10 aa, Artificial Sequence
  Artificially Synthesized Peptide
GTFNSVVLSR

SEQ ID NO: 3311 - protein, 10 aa, Artificial Sequence
  Artificially Synthesized Peptide
YMFDVVLGAK

SEQ ID NO: 3312 - protein, 10 aa, Artificial Sequence
  Artificially Synthesized Peptide
MMWYWGPSLK

SEQ ID NO: 3313 - protein, 10 aa, Artificial Sequence
  Artificially Synthesized Peptide
MMWYWGPSLR

SEQ ID NO: 3314 - protein, 9 aa, Artificial Sequence
  Artificially Synthesized Peptide
  VARIANT (5)...(5): Xaa = Any Amino Acid
ILLLXLIFL

SEQ ID NO: 3315 - protein, 9 aa, Artificial Sequence
  Artificially Synthesized Peptide
  VARIANT (4)...(4): Xaa = Any Amino Acid
LLLXLIFLL

SEQ ID NO: 3316 - protein, 9 aa, Artificial Sequence
  Artificially Synthesized Peptide
  VARIANT (3)...(3): Xaa = Any Amino Acid
LLXLIFLLV

SEQ ID NO: 3317 - protein, 9 aa, Artificial Sequence
  Artificially Synthesized Peptide
  VARIANT (8)...(8): Xaa = Any Amino Acid
PLLPIFFXL

SEQ ID NO: 3318 - protein, 9 aa, Artificial Sequence
  Artificially Synthesized Peptide
  VARIANT (8)...(8): Xaa = Any Amino Acid
ALMPLYAXI

SEQ ID NO: 3319 - protein, 9 aa, Artificial Sequence
  Artificially Synthesized Peptide
  VARIANT (3)...(3): Xaa = Any Amino Acid
GLXQVFADA

SEQ ID NO: 3320 - protein, 9 aa, Artificial Sequence
  Artificially Synthesized Peptide
  VARIANT (4)...(4): Xaa = Any Amino Acid
HISXLTFGR

SEQ ID NO: 3321 - protein, 9 aa, Artificial Sequence
  Artificially Synthesized Peptide
  VARIANT (6)...(6): Xaa = Any Amino Acid
FVLGGXRHK

SEQ ID NO: 3322 - protein, 10 aa, Artificial Sequence
  Artificially Synthesized Peptide
  VARIANT (6)...(6): Xaa = Any Amino Acid
FILLLXLIFL

SEQ ID NO: 3323 - protein, 10 aa, Artificial Sequence
  Artificially Synthesized Peptide
  VARIANT (5)...(5): Xaa = Any Amino Acid
ILLLXLIFLL

SEQ ID NO: 3324 - protein, 10 aa, Artificial Sequence
  Artificially Synthesized Peptide
  VARIANT (4)...(4): Xaa = Any Amino Acid
LLLXLIFLLV

SEQ ID NO: 3325 - protein, 10 aa, Artificial Sequence
  Artificially Synthesized Peptide
  VARIANT (7)...(7): Xaa = Any Amino Acid
LLPIFFXLWV

SEQ ID NO: 3326 - protein, 10 aa, Artificial Sequence
  Artificially Synthesized Peptide
  VARIANT (9)...(9): Xaa = Any Amino Acid
QLLWFHISXL

SEQ ID NO: 3327 - protein, 10 aa, Artificial Sequence
  Artificially Synthesized Peptide
  VARIANT (4)...(4): Xaa = Any Amino Acid
LLGXAANWIL

SEQ ID NO: 3328 - protein, 10 aa, Artificial Sequence
  Artificially Synthesized Peptide
  VARIANT (5)...(5): Xaa = Any Amino Acid
TSAIXSVVRR

SEQ ID NO: 3329 - protein, 10 aa, Artificial Sequence
  Artificially Synthesized Peptide
  VARIANT (6)...(6): Xaa = Any Amino Acid
GYRWMXLRRF

SEQ ID NO: 3330 - protein, 10 aa, Artificial Sequence
  Artificially Synthesized Peptide
  VARIANT (3)...(3): Xaa = Any Amino Acid
GPXALRFTSA

SEQ ID NO: 3331 - protein, 10 aa, Artificial Sequence
  Artificially Synthesized Peptide
  VARIANT (4)...(4): Xaa = Any Amino Acid
FPHXLAFSYM

SEQ ID NO: 3332 - protein, 11 aa, Artificial Sequence
  Artificially Synthesized Peptide
HMLWKAGILYK

SEQ ID NO: 3333 - protein, 11 aa, Artificial Sequence
  Artificially Synthesized Peptide
HVLWKAGILYK

SEQ ID NO: 3334 - protein, 11 aa, Artificial Sequence
  Artificially Synthesized Peptide
SMLPETTVVRR

SEQ ID NO: 3335 - protein, 11 aa, Artificial Sequence
  Artificially Synthesized Peptide
SVLPETTVVRR

SEQ ID NO: 3336 - protein, 11 aa, Artificial Sequence
  Artificially Synthesized Peptide
GMDNSVVLSRK

SEQ ID NO: 3337 - protein, 11 aa, Artificial Sequence
  Artificially Synthesized Peptide
GVDNSVVLSRK

SEQ ID NO: 3338 - protein, 11 aa, Artificial Sequence
  Artificially Synthesized Peptide
GTFNSVVLSRK

SEQ ID NO: 3339 - protein, 8 aa, Artificial Sequence
  Artificially Synthesized Peptide
MPLSYQHI

SEQ ID NO: 3340 - protein, 8 aa, Artificial Sequence
  Artificially Synthesized Peptide
LPIFFCLI

SEQ ID NO: 3341 - protein, 8 aa, Artificial Sequence
  Artificially Synthesized Peptide
SPFLLAQI

SEQ ID NO: 3342 - protein, 8 aa, Artificial Sequence
  Artificially Synthesized Peptide
YPALMPLI

SEQ ID NO: 3343 - protein, 8 aa, Artificial Sequence
  Artificially Synthesized Peptide
VPSALNPI

SEQ ID NO: 3344 - protein, 9 aa, Artificial Sequence
  Artificially Synthesized Peptide
LPIFFCLWI

SEQ ID NO: 3345 - protein, 9 aa, Artificial Sequence
  Artificially Synthesized Peptide
LPIHTAELI

SEQ ID NO: 3346 - protein, 10 aa, Artificial Sequence
  Artificially Synthesized Peptide
VPFVQWFVGI

SEQ ID NO: 3347 - protein, 11 aa, Artificial Sequence
  Artificially Synthesized Peptide
NPLGFFPDHQI

SEQ ID NO: 3348 - protein, 11 aa, Artificial Sequence
  Artificially Synthesized Peptide
LPIHTAELLAI

SEQ ID NO: 3349 - protein, 9 aa, Artificial Sequence
  Artificially Synthesized Peptide
FLPSYFPSA

SEQ ID NO: 3350 - protein, 10 aa, Artificial Sequence
  Artificially Synthesized Peptide
YLHTLWKAGV

SEQ ID NO: 3351 - protein, 11 aa, Artificial Sequence
  Artificially Synthesized Peptide
STLPETYVVRR

SEQ ID NO: 3352 - protein, 9 aa, Artificial Sequence
  Artificially Synthesized Peptide
YMDDVVLGV

SEQ ID NO: 3353 - protein, 9 aa, Artificial Sequence
  Artificially Synthesized Peptide
FPIPSSWAF

SEQ ID NO: 3354 - protein, 9 aa, Artificial Sequence
  Artificially Synthesized Peptide
IPITSSWAF

SEQ ID NO: 3355 - protein, 9 aa, Artificial Sequence
  Artificially Synthesized Peptide
IPILSSWAF

SEQ ID NO: 3356 - protein, 9 aa, Artificial Sequence
  Artificially Synthesized Peptide
FPVCLAFSY

SEQ ID NO: 3357 - protein, 9 aa, Artificial Sequence
  Artificially Synthesized Peptide
FPHCLAFAY

SEQ ID NO: 3358 - protein, 9 aa, Artificial Sequence
  Artificially Synthesized Peptide
FPHCLAFSL

SEQ ID NO: 3359 - protein, 9 aa, Artificial Sequence
  Artificially Synthesized Peptide
IPIPMSWAF

SEQ ID NO: 3360 - protein, 9 aa, Artificial Sequence
  Artificially Synthesized Peptide
FPHCLAFAL

SEQ ID NO: 3361 - protein, 10 aa, Artificial Sequence
  Artificially Synthesized Peptide
FLPSZFFPSV

SEQ ID NO: 3362 - protein, 10 aa, Artificial Sequence
  Artificially Synthesized Peptide
FLPSZFFPSV

SEQ ID NO: 3363 - protein, 9 aa, Artificial Sequence
  Artificially Synthesized Peptide
IPFPSSWAF

SEQ ID NO: 3364 - protein, 9 aa, Artificial Sequence
  Artificially Synthesized Peptide
IPIPSSWAI

SEQ ID NO: 3365 - protein, 9 aa, Artificial Sequence
  Artificially Synthesized Peptide
FPFCLAFSY

SEQ ID NO: 3366 - protein, 9 aa, Artificial Sequence
  Artificially Synthesized Peptide
FPHCLAFSI

SEQ ID NO: 3367 - protein, 9 aa, Artificial Sequence
  Artificially Synthesized Peptide
FPHCLAFSA

SEQ ID NO: 3368 - protein, 10 aa, Artificial Sequence
  Artificially Synthesized Peptide
FQPSDYFPSV

SEQ ID NO: 3369 - protein, 9 aa, Artificial Sequence
  Artificially Synthesized Peptide
YLLTRILTI

SEQ ID NO: 3370 - protein, 9 aa, Artificial Sequence
  Artificially Synthesized Peptide
FLYTRILTI

SEQ ID NO: 3371 - protein, 9 aa, Artificial Sequence
  Artificially Synthesized Peptide
FLLTYILTI

SEQ ID NO: 3372 - protein, 9 aa, Artificial Sequence
  Artificially Synthesized Peptide
FLLTRILYI

SEQ ID NO: 3373 - protein, 11 aa, Artificial Sequence
  Artificially Synthesized Peptide
FLPSDFFPSVR

SEQ ID NO: 3374 - protein, 9 aa, Artificial Sequence
  Artificially Synthesized Peptide
FLPSDFFPS

SEQ ID NO: 3375 - protein, 8 aa, Artificial Sequence
  Artificially Synthesized Peptide
FLPSDFFP

SEQ ID NO: 3376 - protein, 10 aa, Artificial Sequence
  Artificially Synthesized Peptide
FLPSDFFPSI

SEQ ID NO: 3377 - protein, 10 aa, Artificial Sequence
  Artificially Synthesized Peptide
FLPSDYFPSV

SEQ ID NO: 3378 - protein, 12 aa, Artificial Sequence
  Artificially Synthesized Peptide
YSFLPSDFFPSV

SEQ ID NO: 3379 - protein, 10 aa, Artificial Sequence
  Artificially Synthesized Peptide
YNMGLKFRQL

SEQ ID NO: 3380 - protein, 9 aa, Artificial Sequence
  Artificially Synthesized Peptide
NMGLKYRQL

SEQ ID NO: 3381 - protein, 10 aa, Artificial Sequence
  Artificially Synthesized Peptide
  VARIANT (5)...(5): Xaa = Any Amino Acid
FLPSXYFPSV

SEQ ID NO: 3382 - protein, 10 aa, Artificial Sequence
  Artificially Synthesized Peptide
  VARIANT (6)...(6): Xaa = Any Amino Acid
FLPSDXFPSV

SEQ ID NO: 3383 - protein, 11 aa, Artificial Sequence
  Artificially Synthesized Peptide
FLPSDLLPSVR

SEQ ID NO: 3384 - protein, 12 aa, Artificial Sequence
  Artificially Synthesized Peptide
FLPSDFFPSVRD

SEQ ID NO: 3385 - protein, 12 aa, Artificial Sequence
  Artificially Synthesized Peptide
LSFLPSDFFPSV

SEQ ID NO: 3386 - protein, 11 aa, Artificial Sequence
  Artificially Synthesized Peptide
SFLPSDFFPSV

SEQ ID NO: 3387 - protein, 8 aa, Artificial Sequence
  Artificially Synthesized Peptide
PSDFFPSV

SEQ ID NO: 3388 - protein, 9 aa, Artificial Sequence
  Artificially Synthesized Peptide
FLMSYFPSV

SEQ ID NO: 3389 - protein, 9 aa, Artificial Sequence
  Artificially Synthesized Peptide
FLPSYFPSV

SEQ ID NO: 3390 - protein, 10 aa, Artificial Sequence
  Artificially Synthesized Peptide
FLMSDYFPSV

SEQ ID NO: 3391 - protein, 11 aa, Artificial Sequence
  Artificially Synthesized Peptide
CILLLCLIFLL

SEQ ID NO: 3392 - protein, 10 aa, Artificial Sequence
  Artificially Synthesized Peptide
FLPNDFFPSA

SEQ ID NO: 3393 - protein, 10 aa, Artificial Sequence
  Artificially Synthesized Peptide
FLPDDFFPSA

SEQ ID NO: 3394 - protein, 10 aa, Artificial Sequence
  Artificially Synthesized Peptide
FLPNDFFPSV

SEQ ID NO: 3395 - protein, 10 aa, Artificial Sequence
  Artificially Synthesized Peptide
FLPSDFFPSA

SEQ ID NO: 3396 - protein, 10 aa, Artificial Sequence
  Artificially Synthesized Peptide
FLPDDFFPSV

SEQ ID NO: 3397 - protein, 10 aa, Artificial Sequence
  Artificially Synthesized Peptide
FLPADFFPSV

SEQ ID NO: 3398 - protein, 10 aa, Artificial Sequence
  Artificially Synthesized Peptide
FLPVDFFPSV

SEQ ID NO: 3399 - protein, 10 aa, Artificial Sequence
  Artificially Synthesized Peptide
FLPADFFPSI

SEQ ID NO: 3400 - protein, 10 aa, Artificial Sequence
  Artificially Synthesized Peptide
FLPVDFFPSI

SEQ ID NO: 3401 - protein, 10 aa, Artificial Sequence
  Artificially Synthesized Peptide
FLPSDAFPSV

SEQ ID NO: 3402 - protein, 10 aa, Artificial Sequence
  Artificially Synthesized Peptide
FLPSAFFPSV

SEQ ID NO: 3403 - protein, 10 aa, Artificial Sequence
  Artificially Synthesized Peptide
FLPSDFAPSV

SEQ ID NO: 3404 - protein, 10 aa, Artificial Sequence
  Artificially Synthesized Peptide
FLPSDFFASV

SEQ ID NO: 3405 - protein, 10 aa, Artificial Sequence
  Artificially Synthesized Peptide
FLPSDFFPAV

SEQ ID NO: 3406 - protein, 10 aa, Artificial Sequence
  Artificially Synthesized Peptide
FLASDFFPSV

SEQ ID NO: 3407 - protein, 10 aa, Artificial Sequence
  Artificially Synthesized Peptide
FAPSDFFPSV

SEQ ID NO: 3408 - protein, 10 aa, Artificial Sequence
  Artificially Synthesized Peptide
ALPSDFFPSV

SEQ ID NO: 3409 - protein, 10 aa, Artificial Sequence
  Artificially Synthesized Peptide
YLPSDFFPSV

SEQ ID NO: 3410 - protein, 10 aa, Artificial Sequence
  Artificially Synthesized Peptide
FMPSDFFPSV

SEQ ID NO: 3411 - protein, 10 aa, Artificial Sequence
  Artificially Synthesized Peptide
FLKSDFFPSV

SEQ ID NO: 3412 - protein, 10 aa, Artificial Sequence
  Artificially Synthesized Peptide
FLPSEFFPSV

SEQ ID NO: 3413 - protein, 10 aa, Artificial Sequence
  Artificially Synthesized Peptide
FLPSDFYPSV

SEQ ID NO: 3414 - protein, 10 aa, Artificial Sequence
  Artificially Synthesized Peptide
FLPSDFFKSV

SEQ ID NO: 3415 - protein, 10 aa, Artificial Sequence
  Artificially Synthesized Peptide
FLPSDFFPKV

SEQ ID NO: 3416 - protein, 10 aa, Artificial Sequence
  Artificially Synthesized Peptide
  MOD_RES (10)...(10): Xaa = Val-CONH2
FLPSDFFPSX

SEQ ID NO: 3417 - protein, 10 aa, Artificial Sequence
  Artificially Synthesized Peptide
  MOD_RES (10)...(10): Xaa = Val-NH2
VLEYLVSFGX

SEQ ID NO: 3418 - protein, 17 aa, Artificial Sequence
  Artificially Synthesized Peptide
  MOD_RES (17)...(17): Xaa = Val-NH2
ATVELLSFLPSDFFPSX

SEQ ID NO: 3419 - protein, 16 aa, Artificial Sequence
  Artificially Synthesized Peptide
  MOD_RES (16)...(16): Xaa = Val-NH2
TVELLSFLPSDFFPSX

SEQ ID NO: 3420 - protein, 15 aa, Artificial Sequence
  Artificially Synthesized Peptide
  MOD_RES (15)...(15): Xaa = Val-NH2
VELLSFLPSDFFPSX

SEQ ID NO: 3421 - protein, 14 aa, Artificial Sequence
  Artificially Synthesized Peptide
  MOD_RES (14)...(14): Xaa = Val-NH2
ELLSFLPSDFFPSX

SEQ ID NO: 3422 - protein, 13 aa, Artificial Sequence
  Artificially Synthesized Peptide
  MOD_RES (13)...(13): Xaa = Val-NH2
LLSFLPSDFFPSX

SEQ ID NO: 3423 - protein, 12 aa, Artificial Sequence
  Artificially Synthesized Peptide
  MOD_RES (12)...(12): Xaa = Val-NH2
LSFLPSDFFPSX

SEQ ID NO: 3424 - protein, 11 aa, Artificial Sequence
  Artificially Synthesized Peptide
  MOD_RES (11)...(11): Xaa = Val-NH2
SFLPSDFFPSX

SEQ ID NO: 3425 - protein, 10 aa, Artificial Sequence
  Artificially Synthesized Peptide
  MOD_RES (10)...(10): Xaa = Val-NH2
FLPSDFFPSX

SEQ ID NO: 3426 - protein, 9 aa, Artificial Sequence
  Artificially Synthesized Peptide
  MOD_RES (9)...(9): Xaa = Val-NH2
LPSDFFPSX

SEQ ID NO: 3427 - protein, 8 aa, Artificial Sequence
  Artificially Synthesized Peptide
  MOD_RES (8)...(8): Xaa = Val-NH2
PSDFFPSX

SEQ ID NO: 3428 - protein, 9 aa, Artificial Sequence
  Artificially Synthesized Peptide
  MOD_RES (9)...(9): Xaa = Ser-NH2
FLPSDFFPX

SEQ ID NO: 3429 - protein, 8 aa, Artificial Sequence
  Artificially Synthesized Peptide
  MOD_RES (8)...(8): Xaa = Pro-NH2
FLPSDFFX

SEQ ID NO: 3430 - protein, 7 aa, Artificial Sequence
  Artificially Synthesized Peptide
  MOD_RES (7)...(7): Xaa = Phe-NH2
FLPSDFX

SEQ ID NO: 3431 - protein, 10 aa, Artificial Sequence
  Artificially Synthesized Peptide
  MOD_RES (10)...(10): Xaa = Val-NH2
ALPSDFFPSX

SEQ ID NO: 3432 - protein, 10 aa, Artificial Sequence
  Artificially Synthesized Peptide
  MOD_RES (10)...(10): Xaa = Val-NH2
SLNFLGGTTX

SEQ ID NO: 3433 - protein, 11 aa, Artificial Sequence
  Artificially Synthesized Peptide
  MOD_RES (11)...(11): Xaa = Arg-NH2
FLPSDFFPSVX

SEQ ID NO: 3434 - protein, 9 aa, Artificial Sequence
  Artificially Synthesized Peptide
ALFKDWEEL

SEQ ID NO: 3435 - protein, 9 aa, Artificial Sequence
  Artificially Synthesized Peptide
VLGGSRHKL

SEQ ID NO: 3436 - protein, 9 aa, Artificial Sequence
  Artificially Synthesized Peptide
KIKESFRKL

SEQ ID NO: 3437 - protein, 9 aa, Artificial Sequence
  Artificially Synthesized Peptide
ALMPLYASI

SEQ ID NO: 3438 - protein, 9 aa, Artificial Sequence
  Artificially Synthesized Peptide
FLSKQYLNL

SEQ ID NO: 3439 - protein, 9 aa, Artificial Sequence
  Artificially Synthesized Peptide
LLGSAANWI

SEQ ID NO: 3440 - protein, 9 aa, Artificial Sequence
  Artificially Synthesized Peptide
NLNNLNVSI

SEQ ID NO: 3441 - protein, 9 aa, Artificial Sequence
  Artificially Synthesized Peptide
IIKKSEQFV

SEQ ID NO: 3442 - protein, 9 aa, Artificial Sequence
  Artificially Synthesized Peptide
ALSLIVNLL

SEQ ID NO: 3443 - protein, 9 aa, Artificial Sequence
  Artificially Synthesized Peptide
RIPRTPRSV

SEQ ID NO: 3444 - protein, 8 aa, Artificial Sequence
  Artificially Synthesized Peptide
AACFARSR

SEQ ID NO: 3445 - protein, 9 aa, Artificial Sequence
  Artificially Synthesized Peptide
AAPFTQCGY

SEQ ID NO: 3446 - protein, 8 aa, Artificial Sequence
  Artificially Synthesized Peptide
ADDPSRGR

SEQ ID NO: 3447 - protein, 10 aa, Artificial Sequence
  Artificially Synthesized Peptide
AFPHCLAFSY

SEQ ID NO: 3448 - protein, 11 aa, Artificial Sequence
  Artificially Synthesized Peptide
AFSSAGPCALR

SEQ ID NO: 3449 - protein, 8 aa, Artificial Sequence
  Artificially Synthesized Peptide
AFTFSPTY

SEQ ID NO: 3450 - protein, 9 aa, Artificial Sequence
  Artificially Synthesized Peptide
AFTFSPTYK

SEQ ID NO: 3451 - protein, 8 aa, Artificial Sequence
  Artificially Synthesized Peptide
AGFFLLTR

SEQ ID NO: 3452 - protein, 10 aa, Artificial Sequence
  Artificially Synthesized Peptide
AGPLEEELPR

SEQ ID NO: 3453 - protein, 8 aa, Artificial Sequence
  Artificially Synthesized Peptide
AICSVVRR

SEQ ID NO: 3454 - protein, 11 aa, Artificial Sequence
  Artificially Synthesized Peptide
ALESPEHCSPH

SEQ ID NO: 3455 - protein, 10 aa, Artificial Sequence
  Artificially Synthesized Peptide
ALNPADDPSR

SEQ ID NO: 3456 - protein, 8 aa, Artificial Sequence
  Artificially Synthesized Peptide
ALRFTSAR

SEQ ID NO: 3457 - protein, 10 aa, Artificial Sequence
  Artificially Synthesized Peptide
AMQWNSTTFH

SEQ ID NO: 3458 - protein, 8 aa, Artificial Sequence
  Artificially Synthesized Peptide
ASFCGSPY

SEQ ID NO: 3459 - protein, 9 aa, Artificial Sequence
  Artificially Synthesized Peptide
ASPLHVAWR

SEQ ID NO: 3460 - protein, 9 aa, Artificial Sequence
  Artificially Synthesized Peptide
ASTNRQSGR

SEQ ID NO: 3461 - protein, 8 aa, Artificial Sequence
  Artificially Synthesized Peptide
CAANWILR

SEQ ID NO: 3462 - protein, 9 aa, Artificial Sequence
  Artificially Synthesized Peptide
CALRFTSAR

SEQ ID NO: 3463 - protein, 8 aa, Artificial Sequence
  Artificially Synthesized Peptide
CCQLDPAR

SEQ ID NO: 3464 - protein, 9 aa, Artificial Sequence
  Artificially Synthesized Peptide
CFRKLPVNR

SEQ ID NO: 3465 - protein, 10 aa, Artificial Sequence
  Artificially Synthesized Peptide
CGYPALMPLY

SEQ ID NO: 3466 - protein, 11 aa, Artificial Sequence
  Artificially Synthesized Peptide
CLIFLLVLLDY

SEQ ID NO: 3467 - protein, 10 aa, Artificial Sequence
  Artificially Synthesized Peptide
CLRPVGAESR

SEQ ID NO: 3468 - protein, 9 aa, Artificial Sequence
  Artificially Synthesized Peptide
CSPHHTALR

SEQ ID NO: 3469 - protein, 10 aa, Artificial Sequence
  Artificially Synthesized Peptide
CSVVRRAFPH

SEQ ID NO: 3470 - protein, 8 aa, Artificial Sequence
  Artificially Synthesized Peptide
DDVVLGAK

SEQ ID NO: 3471 - protein, 10 aa, Artificial Sequence
  Artificially Synthesized Peptide
DLLDTASALY

SEQ ID NO: 3472 - protein, 11 aa, Artificial Sequence
  Artificially Synthesized Peptide
DLLDTASALYR

SEQ ID NO: 3473 - protein, 8 aa, Artificial Sequence
  Artificially Synthesized Peptide
DNSVVLSR

SEQ ID NO: 3474 - protein, 9 aa, Artificial Sequence
  Artificially Synthesized Peptide
DNSVVLSRK

SEQ ID NO: 3475 - protein, 9 aa, Artificial Sequence
  Artificial Peptide
YLEPAIAKY

SEQ ID NO: 3476 - protein, 10 aa, Artificial Sequence
  Artificial Peptide
FLPSDYFPSV

SEQ ID NO: 3477 - protein, 9 aa, Artificial Sequence
  Artificial Peptide
FTQAGYPAL

SEQ ID NO: 3478 - protein, 10 aa, Artificial Sequence
  Artificial Peptide
KVFPYALINK

SEQ ID NO: 3479 - protein, 9 aa, Artificial Sequence
  Artificial Peptide
AVDLYHFLK

SEQ ID NO: 3480 - protein, 11 aa, Artificial Sequence
  Artificial Peptide
STLPETYVVRR

SEQ ID NO: 3481 - protein, 9 aa, Artificial Sequence
  Artificial Peptide
AYIDNYNKF

SEQ ID NO: 3482 - protein, 9 aa, Artificial Sequence
  Artificial Peptide
APRTLVYLL

SEQ ID NO: 3483 - protein, 9 aa, Artificial Sequence
  Artificial Peptide
FPFKYAAAF

SEQ ID NO: 3484 - protein, 13 aa, Artificial Sequence
  Artificial Peptide
PKYVKQNTLKLAT

SEQ ID NO: 3485 - protein, 12 aa, Artificial Sequence
  Artificial Peptide
YKTIAFDEEARR

SEQ ID NO: 3486 - protein, 13 aa, Artificial Sequence
  Artificial Peptide
YARFSQTTLKQKT

SEQ ID NO: 3487 - protein, 14 aa, Artificial Sequence
  Artificial Peptide
QYIKANSKFIGITE

SEQ ID NO: 3488 - protein, 15 aa, Artificial Sequence
  Artificial Peptide
EALIHQLKINPYVLS

SEQ ID NO: 3489 - protein, 14 aa, Artificial Sequence
  Artificial Peptide
QYIKANAKFIGITE

SEQ ID NO: 3490 - protein, 24 aa, Artificial Sequence
  Artificial Peptide
GRTQDENPVVHFFKNIVTPRTPPP

SEQ ID NO: 3491 - protein, 13 aa, Artificial Sequence
  Artificial Peptide
NGQIGNDPNRDIL

SEQ ID NO: 3492 - protein, 10 aa, Artificial Sequence
  Artificial Peptide
FLPSDFFPSV

SEQ ID NO: 3493 - protein, 10 aa, Artificial Sequence
  Artificial Peptide
LLVPFVQWFV

SEQ ID NO: 3494 - protein, 10 aa, Artificial Sequence
  Artificial Peptide
FLLAQFTSAI

SEQ ID NO: 3495 - protein, 9 aa, Artificial Sequence
  Artificial Peptide
YMDDVVLGV

SEQ ID NO: 3496 - protein, 9 aa, Artificial Sequence
  Artificial Peptide
FLLTRILTI

SEQ ID NO: 3497 - protein, 9 aa, Artificial Sequence
  Artificial Peptide
ALMPLYACI

SEQ ID NO: 3498 - protein, 9 aa, Artificial Sequence
  Artificial Peptide
WLSLLVPFV

SEQ ID NO: 3499 - protein, 9 aa, Artificial Sequence
  Artificial Peptide
LLAQFTSAI

SEQ ID NO: 3500 - protein, 9 aa, Artificial Sequence
  Artificial Peptide
LVPFVQWFV

SEQ ID NO: 3501 - protein, 11 aa, Artificial Sequence
  Artificial Peptide
VLLDYQGMLPV

SEQ ID NO: 3502 - protein, 9 aa, Artificial Sequence
  Artificial Peptide
LLSSNLSWL

SEQ ID NO: 3503 - protein, 9 aa, Artificial Sequence
  Artificial Peptide
NLSWLSLDV

SEQ ID NO: 3504 - protein, 9 aa, Artificial Sequence
  Artificial Peptide
KLHLYSHPI

SEQ ID NO: 3505 - protein, 9 aa, Artificial Sequence
  Artificial Peptide
FLLAQFTSA

SEQ ID NO: 3506 - protein, 9 aa, Artificial Sequence
  Artificial Peptide
GLSRYVARL

SEQ ID NO: 3507 - protein, 9 aa, Artificial Sequence
  Artificial Peptide
FLLSLGIHL

SEQ ID NO: 3508 - protein, 9 aa, Artificial Sequence
  Artificial Peptide
HLYSHPIIL

SEQ ID NO: 3509 - protein, 9 aa, Artificial Sequence
  Artificial Peptide
MMWTWGPSL

SEQ ID NO: 3510 - protein, 10 aa, Artificial Sequence
  Artificial Peptide
YLHTLWKAGV

SEQ ID NO: 3511 - protein, 10 aa, Artificial Sequence
  Artificial Peptide
LLDYQGMLPV

SEQ ID NO: 3512 - protein, 9 aa, Artificial Sequence
  Artificial Peptide
GLLGWSPQA

SEQ ID NO: 3513 - protein, 10 aa, Artificial Sequence
  Artificial Peptide
ILRGTSFVYV

SEQ ID NO: 3514 - protein, 9 aa, Artificial Sequence
  Artificial Peptide
VLQAGFFLL

SEQ ID NO: 3515 - protein, 10 aa, Artificial Sequence
  Artificial Peptide
LLPIFFCLWV

SEQ ID NO: 3516 - protein, 9 aa, Artificial Sequence
  Artificial Peptide
PLLPIFFCL

SEQ ID NO: 3517 - protein, 10 aa, Artificial Sequence
  Artificial Peptide
LLVLQAGFFL

SEQ ID NO: 3518 - protein, 9 aa, Artificial Sequence
  Artificial Peptide
YLVSFGVWI

SEQ ID NO: 3519 - protein, 10 aa, Artificial Sequence
  Artificial Peptide
GLSPTVWLSV

SEQ ID NO: 3520 - protein, 9 aa, Artificial Sequence
  Artificial Peptide
YMDDVVLGA

SEQ ID NO: 3521 - protein, 11 aa, Artificial Sequence
  Artificial Peptide
HTLWKAGILYK

SEQ ID NO: 3522 - protein, 11 aa, Artificial Sequence
  Artificial Peptide
STLPETTVVRR

SEQ ID NO: 3523 - protein, 9 aa, Artificial Sequence
  Artificial Peptide
GSTHVSWPK

SEQ ID NO: 3524 - protein, 9 aa, Artificial Sequence
  Artificial Peptide
FVLGGCRHK

SEQ ID NO: 3525 - protein, 9 aa, Artificial Sequence
  Artificial Peptide
NVSIPWTHK

SEQ ID NO: 3526 - protein, 10 aa, Artificial Sequence
  Artificial Peptide
LVVDFSQFSR

SEQ ID NO: 3527 - protein, 10 aa, Artificial Sequence
  Artificial Peptide
QAFTFSPTYK

SEQ ID NO: 3528 - protein, 9 aa, Artificial Sequence
  Artificial Peptide
SAICSVVRR

SEQ ID NO: 3529 - protein, 10 aa, Artificial Sequence
  Artificial Peptide
TLWKAGILYK

SEQ ID NO: 3530 - protein, 9 aa, Artificial Sequence
  Artificial Peptide
KVGNFTGLY

SEQ ID NO: 3531 - protein, 10 aa, Artificial Sequence
  Artificial Peptide
FPHCLAFSYM

SEQ ID NO: 3532 - protein, 9 aa, Artificial Sequence
  Artificial Peptide
LPSDFFPSV

SEQ ID NO: 3533 - protein, 9 aa, Artificial Sequence
  Artificial Peptide
IPIPSSWAF

SEQ ID NO: 3534 - protein, 9 aa, Artificial Sequence
  Artificial Peptide
HPAAMPHLL

SEQ ID NO: 3535 - protein, 9 aa, Artificial Sequence
  Artificial Peptide
LPVCAFSSA

SEQ ID NO: 3536 - protein, 9 aa, Artificial Sequence
  Artificial Peptide
YPALMPLYA

SEQ ID NO: 3537 - protein, 10 aa, Artificial Sequence
  Artificial Peptide
FPHCLAFSYM

SEQ ID NO: 3538 - protein, 10 aa, Artificial Sequence
  Artificial Peptide
TPARVTGGVF

SEQ ID NO: 3539 - protein, 9 aa, Artificial Sequence
  Artificial Peptide
YTAVVPLVY

SEQ ID NO: 3540 - protein, 10 aa, Artificial Sequence
  Artificial Peptide
FLPSDYFPSV

SEQ ID NO: 3541 - protein, 10 aa, Artificial Sequence
  Artificial Peptide
KVFPYALINK

SEQ ID NO: 3542 - protein, 9 aa, Artificial Sequence
  Artificial Peptide
AYIDNYNKF

SEQ ID NO: 3543 - protein, 11 aa, Artificial Sequence
  Artificial Peptide
STLPETYVVRR

SEQ ID NO: 3544 - protein, 9 aa, Artificial Sequence
  Artificial Peptide
FTQAGYPAL

SEQ ID NO: 3545 - protein, 9 aa, Artificial Sequence
  Artificial Peptide
APRTLVYLL

SEQ ID NO: 3546 - protein, 8 aa, Artificial Sequence
  Artificial Peptide
FLKDYQLL

SEQ ID NO: 3547 - protein, 9 aa, Artificial Sequence
  Artificial Peptide
FRYNGLIHR

SEQ ID NO: 3548 - protein, 9 aa, Artificial Sequence
  Artificial Peptide
FPFKYAAAF

SEQ ID NO: 3549 - protein, 9 aa, Artificial Sequence
  Artificial Peptide
AEMGKYSFY

SEQ ID NO: 3550 - protein, 9 aa, Artificial Sequence
  Artificial Peptide
FPFKYAAAF

SEQ ID NO: 3551 - protein, 9 aa, Artificial Sequence
  Artificial Peptide
QYDDAVYKL

SEQ ID NO: 3552 - protein, 9 aa, Artificial Sequence
  Artificial Peptide
YRHDGGNVL

SEQ ID NO: 3553 - protein, 10 aa, Artificial Sequence
  Artificial Peptide
SGPSNTYPEI

SEQ ID NO: 3554 - protein, 8 aa, Artificial Sequence
  Artificial Peptide
RGYVFQGL

SEQ ID NO: 3555 - protein, 10 aa, Artificial Sequence
  Artificial Peptide
RGPYRAFVTI

SEQ ID NO: 3556 - protein, 9 aa, Artificial Sequence
  Artificial Peptide
KFNPMKTYI

SEQ ID NO: 3557 - protein, 12 aa, Artificial Sequence
  Artificial Peptide
IPQSLDSYWTSL

SEQ ID NO: 3558 - protein, 14 aa, Artificial Sequence
  Artificial Peptide
YPKYVKQNTLKLAT

SEQ ID NO: 3559 - protein, 16 aa, Artificial Sequence
  Artificial Peptide
VVHFFKNIVTPRTPPY

SEQ ID NO: 3560 - protein, 14 aa, Artificial Sequence
  Artificial Peptide
YAAFAAAKTAAAFA

SEQ ID NO: 3561 - protein, 12 aa, Artificial Sequence
  Artificial Peptide
YKTIAFDEEARR

SEQ ID NO: 3562 - protein, 14 aa, Artificial Sequence
  Artificial Peptide
YARFQSQTTLKQKT

SEQ ID NO: 3563 - protein, 14 aa, Artificial Sequence
  Artificial Peptide
YARFQRQTTLKAAA

SEQ ID NO: 3564 - protein, 14 aa, Artificial Sequence
  Artificial Peptide
QYIKANSKFIGITE

SEQ ID NO: 3565 - protein, 15 aa, Artificial Sequence
  Artificial Peptide
EALIHQLKINPYVLS

SEQ ID NO: 3566 - protein, 14 aa, Artificial Sequence
  Artificial Peptide
QYIKANAKFIGITE

SEQ ID NO: 3567 - protein, 13 aa, Artificial Sequence
  Artificial Peptide
PKYVKQNTLKLAT

SEQ ID NO: 3568 - protein, 13 aa, Artificial Sequence
  Artificial Peptide
NGQIGNDPNRDIL

SEQ ID NO: 3569 - protein, 14 aa, Artificial Sequence
  Artificial Peptide
YARFQSQTTLKQKT

SEQ ID NO: 3570 - protein, 16 aa, Artificial Sequence
  Artificial Peptide
AHAAHAAHAAHAAHAA

SEQ ID NO: 3571 - protein, 17 aa, Artificial Sequence
  Artificial Peptide
YNTDGSTDYGILQINSR

SEQ ID NO: 3572 - protein, 16 aa, Artificial Sequence
  Artificial Peptide
YLEDARRKKAIYEKKK

SEQ ID NO: 3573 - protein, 9 aa, Artificial Sequence
  Artificial Peptide
VLLDYQGML

SEQ ID NO: 3574 - protein, 10 aa, Artificial Sequence
  Artificial Peptide
ILSTLPETTV

SEQ ID NO: 3575 - protein, 10 aa, Artificial Sequence
  Artificial Peptide
YLHTLWKAGI

SEQ ID NO: 3576 - protein, 9 aa, Artificial Sequence
  Artificial Peptide
LLWFHISCL

SEQ ID NO: 3577 - protein, 10 aa, Artificial Sequence
  Artificial Peptide
FILLLCLIFL

SEQ ID NO: 3578 - protein, 9 aa, Artificial Sequence
  Artificial Peptide
WILRGTSFV

SEQ ID NO: 3579 - protein, 10 aa, Artificial Sequence
  Artificial Peptide
FLGPLLVLQA

SEQ ID NO: 3580 - protein, 10 aa, Artificial Sequence
  Artificial Peptide
ILLLCLIFLL

SEQ ID NO: 3581 - protein, 10 aa, Artificial Sequence
  Artificial Peptide
ILRGTSFVYV

SEQ ID NO: 3582 - protein, 11 aa, Artificial Sequence
  Artificial Peptide
GVWIRTPPAYR

SEQ ID NO: 3583 - protein, 11 aa, Artificial Sequence
  Artificial Peptide
HTLWKAGILYK

SEQ ID NO: 3584 - protein, 11 aa, Artificial Sequence
  Artificial Peptide
RLVVDFSQFSR

SEQ ID NO: 3585 - protein, 9 aa, Artificial Sequence
  Artificial Peptide
CALRFTSAR

SEQ ID NO: 3586 - protein, 9 aa, Artificial Sequence
  Artificial Peptide
KVFVLGGCR

SEQ ID NO: 3587 - protein, 9 aa, Artificial Sequence
  Artificial Peptide
SSAGPCALR

SEQ ID NO: 3588 - protein, 11 aa, Artificial Sequence
  Artificial Peptide
STLPETTVVRR

SEQ ID NO: 3589 - protein, 9 aa, Artificial Sequence
  Artificial Peptide
AFTFSPTYK

SEQ ID NO: 3590 - protein, 8 aa, Artificial Sequence
  Artificial Peptide
FTFSPTYK

SEQ ID NO: 3591 - protein, 9 aa, Artificial Sequence
  Artificial Peptide
FVLGGCRHK

SEQ ID NO: 3592 - protein, 10 aa, Artificial Sequence
  Artificial Peptide
LVVDFSQFSR

SEQ ID NO: 3593 - protein, 9 aa, Artificial Sequence
  Artificial Peptide
NVSIPWTHK

SEQ ID NO: 3594 - protein, 10 aa, Artificial Sequence
  Artificial Peptide
QAFTFSPTYK

SEQ ID NO: 3595 - protein, 9 aa, Artificial Sequence
  Artificial Peptide
SAICSVVRR

SEQ ID NO: 3596 - protein, 9 aa, Artificial Sequence
  Artificial Peptide
SVVRRAFPH

SEQ ID NO: 3597 - protein, 11 aa, Artificial Sequence
  Artificial Peptide
TLPETTVVRRR

SEQ ID NO: 3598 - protein, 8 aa, Artificial Sequence
  Artificial Peptide
VSFGVWIR

SEQ ID NO: 3599 - protein, 9 aa, Artificial Sequence
  Artificial Peptide
KVGNFTGLY

SEQ ID NO: 3600 - protein, 9 aa, Artificial Sequence
  Artificial Peptide
PVNRPIDWK

SEQ ID NO: 3601 - protein, 8 aa, Artificial Sequence
  Artificial Peptide
TLKIMPAR

SEQ ID NO: 3602 - protein, 10 aa, Artificial Sequence
  Artificial Peptide
SLGIHLNPNK

SEQ ID NO: 3603 - protein, 10 aa, Artificial Sequence
  Artificial Peptide
STLPETTVVR

SEQ ID NO: 3604 - protein, 10 aa, Artificial Sequence
  Artificial Peptide
TLPETTVVRR

SEQ ID NO: 3605 - protein, 10 aa, Artificial Sequence
  Artificial Peptide
TLWKAGILYK

SEQ ID NO: 3606 - protein, 9 aa, Artificial Sequence
  Artificial Peptide
TTDLEAYFK

SEQ ID NO: 3607 - protein, 10 aa, Artificial Sequence
  Artificial Peptide
VTGGVFLVDK

SEQ ID NO: 3608 - protein, 9 aa, Artificial Sequence
  Artificial Peptide
VVDFSQFSR

SEQ ID NO: 3609 - protein, 8 aa, Artificial Sequence
  Artificial Peptide
ASFCGSPY

SEQ ID NO: 3610 - protein, 11 aa, Artificial Sequence
  Artificial Peptide
LLPIFFCLWVY

SEQ ID NO: 3611 - protein, 11 aa, Artificial Sequence
  Artificial Peptide
RAFPHCLAFSY

SEQ ID NO: 3612 - protein, 10 aa, Artificial Sequence
  Artificial Peptide
GTDNSVVLSR

SEQ ID NO: 3613 - protein, 10 aa, Artificial Sequence
  Artificial Peptide
HILWKAGILY

SEQ ID NO: 3614 - protein, 9 aa, Artificial Sequence
  Artificial Peptide
ILRGTSFVY

SEQ ID NO: 3615 - protein, 9 aa, Artificial Sequence
  Artificial Peptide
SVSFGVWIR

SEQ ID NO: 3616 - protein, 10 aa, Artificial Sequence
  Artificial Peptide
MMWYWGPSLY

SEQ ID NO: 3617 - protein, 10 aa, Artificial Sequence
  Artificial Peptide
STTDLEAYFK

SEQ ID NO: 3618 - protein, 11 aa, Artificial Sequence
  Artificial Peptide
GTDNSVVLSRK

SEQ ID NO: 3619 - protein, 11 aa, Artificial Sequence
  Artificial Peptide
RVTGGVFLVDK

SEQ ID NO: 3620 - protein, 9 aa, Artificial Sequence
  Artificial Peptide
TLWKAGILY

SEQ ID NO: 3621 - protein, 10 aa, Artificial Sequence
  Artificial Peptide
TMDDVVLGAK

SEQ ID NO: 3622 - protein, 8 aa, Artificial Sequence
  Artificial Peptide
VSIPWTHK

SEQ ID NO: 3623 - protein, 10 aa, Artificial Sequence
  Artificial Peptide
FPHCLAFSYM

SEQ ID NO: 3624 - protein, 9 aa, Artificial Sequence
  Artificial Peptide
IPIPSSWAF

SEQ ID NO: 3625 - protein, 9 aa, Artificial Sequence
  Artificial Peptide
HPAAMPHLL

SEQ ID NO: 3626 - protein, 9 aa, Artificial Sequence
  Artificial Peptide
LPVCAFSSA

SEQ ID NO: 3627 - protein, 9 aa, Artificial Sequence
  Artificial Peptide
YPALMPLYA

SEQ ID NO: 3628 - protein, 9 aa, Artificial Sequence
  Artificial Peptide
LPSDFFPSV

SEQ ID NO: 3629 - protein, 9 aa, Artificial Sequence
  Artificial Peptide
FPHCLAFSY

SEQ ID NO: 3630 - protein, 8 aa, Artificial Sequence
  Artificial Peptide
YPALMPLY

SEQ ID NO: 3631 - protein, 11 aa, Artificial Sequence
  Artificial Peptide
YPALMPLYACI

SEQ ID NO: 3632 - protein, 10 aa, Artificial Sequence
  Artificial Peptide
TPARVTGGVF

SEQ ID NO: 3633 - protein, 9 aa, Artificial Sequence
  Artificial Peptide
LPIFFCLWV

SEQ ID NO: 3634 - protein, 9 aa, Artificial Sequence
  Artificial Peptide
LPIHTAELL

SEQ ID NO: 3635 - protein, 8 aa, Artificial Sequence
  Artificial Peptide
VPFVQWFV

SEQ ID NO: 3636 - protein, 8 aa, Artificial Sequence
  Artificial Peptide
LPIFFCLW

SEQ ID NO: 3637 - protein, 8 aa, Artificial Sequence
  Artificial Peptide
MPLSYQHF

SEQ ID NO: 3638 - protein, 8 aa, Artificial Sequence
  Artificial Peptide
HPAAMPHL

SEQ ID NO: 3639 - protein, 8 aa, Artificial Sequence
  Artificial Peptide
SPFLLAQF

SEQ ID NO: 3640 - protein, 11 aa, Artificial Sequence
  Artificial Peptide
SPFLLAQFTSA

SEQ ID NO: 3641 - protein, 9 aa, Artificial Sequence
  Artificial Peptide
DPSRFRLFL

SEQ ID NO: 3642 - protein, 10 aa, Artificial Sequence
  Artificial Peptide
GPCALRFTSA

SEQ ID NO: 3643 - protein, 10 aa, Artificial Sequence
  Artificial Peptide
HPAAMPHLLV

SEQ ID NO: 3644 - protein, 9 aa, Artificial Sequence
  Artificial Peptide
IPQSLDSWW

SEQ ID NO: 3645 - protein, 10 aa, Artificial Sequence
  Artificial Peptide
LPLDKGIKPY

SEQ ID NO: 3646 - protein, 9 aa, Artificial Sequence
  Artificial Peptide
FPDHQLDPA

SEQ ID NO: 3647 - protein, 10 aa, Artificial Sequence
  Artificial Peptide
IPIPSSWAFA

SEQ ID NO: 3648 - protein, 10 aa, Artificial Sequence
  Artificial Peptide
APFTQCGYPA

SEQ ID NO: 3649 - protein, 10 aa, Artificial Sequence
  Artificial Peptide
LPIHTAELLA

SEQ ID NO: 3650 - protein, 8 aa, Artificial Sequence
  Artificial Peptide
GPLLVLQA

SEQ ID NO: 3651 - protein, 8 aa, Artificial Sequence
  Artificial Peptide
IPIPSSWA

SEQ ID NO: 3652 - protein, 8 aa, Artificial Sequence
  Artificial Peptide
RPPNAPIL

SEQ ID NO: 3653 - protein, 8 aa, Artificial Sequence
  Artificial Peptide
SPTYKAFL

SEQ ID NO: 3654 - protein, 8 aa, Artificial Sequence
  Artificial Peptide
VPSALNPA

SEQ ID NO: 3655 - protein, 11 aa, Artificial Sequence
  Artificial Peptide
APFTQCGYPAL

SEQ ID NO: 3656 - protein, 11 aa, Artificial Sequence
  Artificial Peptide
LPIHTAELLAA

SEQ ID NO: 3657 - protein, 11 aa, Artificial Sequence
  Artificial Peptide
NPADDPSRGRL

SEQ ID NO: 3658 - protein, 11 aa, Artificial Sequence
  Artificial Peptide
RPPNAPILSTL

SEQ ID NO: 3659 - protein, 11 aa, Artificial Sequence
  Artificial Peptide
SPHHTALRQAI

SEQ ID NO: 3660 - protein, 11 aa, Artificial Sequence
  Artificial Peptide
TPARVTGGVFL

SEQ ID NO: 3661 - protein, 9 aa, Artificial Sequence
  Artificial Peptide
LLDTASALY

SEQ ID NO: 3662 - protein, 10 aa, Artificial Sequence
  Artificial Peptide
DLLDTASALY

SEQ ID NO: 3663 - protein, 9 aa, Artificial Sequence
  Artificial Peptide
SLDVSAAFY

SEQ ID NO: 3664 - protein, 10 aa, Artificial Sequence
  Artificial Peptide
LSLDVSAAFY

SEQ ID NO: 3665 - protein, 9 aa, Artificial Sequence
  Artificial Peptide
MSTTDLEAY

SEQ ID NO: 3666 - protein, 11 aa, Artificial Sequence
  Artificial Peptide
WMMWYWGPSLY

SEQ ID NO: 3667 - protein, 9 aa, Artificial Sequence
  Artificial Peptide
YMDDVVLGA

SEQ ID NO: 3668 - protein, 9 aa, Artificial Sequence
  Artificial Peptide
PTTGRTSLY

SEQ ID NO: 3669 - protein, 10 aa, Artificial Sequence
  Artificial Peptide
PLDKGIKPYY

SEQ ID NO: 3670 - protein, 10 aa, Artificial Sequence
  Artificial Peptide
ILLLCLIFLL

SEQ ID NO: 3671 - protein, 10 aa, Artificial Sequence
  Artificial Peptide
HTLWKAGILY

SEQ ID NO: 3672 - protein, 10 aa, Artificial Sequence
  Artificial Peptide
MMWYWGPSLY

SEQ ID NO: 3673 - protein, 10 aa, Artificial Sequence
  Artificial Peptide
WLWGMDIDPY

SEQ ID NO: 3674 - protein, 10 aa, Artificial Sequence
  Artificial Peptide
FAAPFTQCGY

SEQ ID NO: 3675 - protein, 9 aa, Artificial Sequence
  Artificial Peptide
KVGNFTGLY

SEQ ID NO: 3676 - protein, 10 aa, Artificial Sequence
  Artificial Peptide
SWPKFAVPNL

SEQ ID NO: 3677 - protein, 9 aa, Artificial Sequence
  Artificial Peptide
KYTSFPWLL

SEQ ID NO: 3678 - protein, 10 aa, Artificial Sequence
  Artificial Peptide
LYSHPIILGF

SEQ ID NO: 3679 - protein, 10 aa, Artificial Sequence
  Artificial Peptide
RWMCLRRFII

SEQ ID NO: 3680 - protein, 9 aa, Artificial Sequence
  Artificial Peptide
SWLSLLVPF

SEQ ID NO: 3681 - protein, 9 aa, Artificial Sequence
  Artificial Peptide
SWWTSLNFL

SEQ ID NO: 3682 - protein, 9 aa, Artificial Sequence
  Artificial Peptide
RWMCLRRFI

SEQ ID NO: 3683 - protein, 9 aa, Artificial Sequence
  Artificial Peptide
SFCGSPYSW

SEQ ID NO: 3684 - protein, 10 aa, Artificial Sequence
  Artificial Peptide
SYQHFRKLLL

SEQ ID NO: 3685 - protein, 9 aa, Artificial Sequence
  Artificial Peptide
GYPALMPLY

SEQ ID NO: 3686 - protein, 10 aa, Artificial Sequence
  Artificial Peptide
EYLVSFGVWI

SEQ ID NO: 3687 - protein, 9 aa, Artificial Sequence
  Artificial Peptide
AYRPPNAPI

SEQ ID NO: 3688 - protein, 9 aa, Artificial Sequence
  Artificial Peptide
WFHISCLTF

SEQ ID NO: 3689 - protein, 9 aa, Artificial Sequence
  Artificial Peptide
PWTHKVGNF

SEQ ID NO: 3690 - protein, 10 aa, Artificial Sequence
  Artificial Peptide
FLPSDFFPSV

SEQ ID NO: 3691 - protein, 10 aa, Artificial Sequence
  Artificial Peptide
LLVPFVQWFV

SEQ ID NO: 3692 - protein, 10 aa, Artificial Sequence
  Artificial Peptide
FLLAQFTSAI

SEQ ID NO: 3693 - protein, 9 aa, Artificial Sequence
  Artificial Peptide
YMDDVVLGV

SEQ ID NO: 3694 - protein, 9 aa, Artificial Sequence
  Artificial Peptide
FLLTRILTI

SEQ ID NO: 3695 - protein, 9 aa, Artificial Sequence
  Artificial Peptide
ALMPLYACI

SEQ ID NO: 3696 - protein, 9 aa, Artificial Sequence
  Artificial Peptide
WLSLLVPFV

SEQ ID NO: 3697 - protein, 9 aa, Artificial Sequence
  Artificial Peptide
LLAQFTSAI

SEQ ID NO: 3698 - protein, 9 aa, Artificial Sequence
  Artificial Peptide
LVPFVQWFV

SEQ ID NO: 3699 - protein, 11 aa, Artificial Sequence
  Artificial Peptide
VLLDYQGMLPV

SEQ ID NO: 3700 - protein, 9 aa, Artificial Sequence
  Artificial Peptide
LLSSNLSWL

SEQ ID NO: 3701 - protein, 9 aa, Artificial Sequence
  Artificial Peptide
NLSWLSLDV

SEQ ID NO: 3702 - protein, 9 aa, Artificial Sequence
  Artificial Peptide
KLHLYSHPI

SEQ ID NO: 3703 - protein, 9 aa, Artificial Sequence
  Artificial Peptide
FLLAQFTSA

SEQ ID NO: 3704 - protein, 9 aa, Artificial Sequence
  Artificial Peptide
GLSRYVARL

SEQ ID NO: 3705 - protein, 9 aa, Artificial Sequence
  Artificial Peptide
FLLSLGIHL

SEQ ID NO: 3706 - protein, 9 aa, Artificial Sequence
  Artificial Peptide
HLYSHPIIL

SEQ ID NO: 3707 - protein, 9 aa, Artificial Sequence
  Artificial Peptide
MMWYWGPSL

SEQ ID NO: 3708 - protein, 10 aa, Artificial Sequence
  Artificial Peptide
YLHTLWKAGV

SEQ ID NO: 3709 - protein, 10 aa, Artificial Sequence
  Artificial Peptide
LLDYQGMLPV

SEQ ID NO: 3710 - protein, 9 aa, Artificial Sequence
  Artificial Peptide
GLLGWSPQA

SEQ ID NO: 3711 - protein, 10 aa, Artificial Sequence
  Artificial Peptide
ILRGTSFVYV

SEQ ID NO: 3712 - protein, 9 aa, Artificial Sequence
  Artificial Peptide
VLQAGFFLL

SEQ ID NO: 3713 - protein, 10 aa, Artificial Sequence
  Artificial Peptide
LLPIFFCLWV

SEQ ID NO: 3714 - protein, 9 aa, Artificial Sequence
  Artificial Peptide
PLLPIFFCL

SEQ ID NO: 3715 - protein, 10 aa, Artificial Sequence
  Artificial Peptide
LLVLQAGFFL

SEQ ID NO: 3716 - protein, 9 aa, Artificial Sequence
  Artificial Peptide
YLVSFGVWI

SEQ ID NO: 3717 - protein, 10 aa, Artificial Sequence
  Artificial Peptide
GLSPTVWLSV

SEQ ID NO: 3718 - protein, 9 aa, Artificial Sequence
  Artificial Peptide
YMDDVVLGA

SEQ ID NO: 3719 - protein, 11 aa, Artificial Sequence
  Artificial Peptide
HTLWKAGILYK

SEQ ID NO: 3720 - protein, 11 aa, Artificial Sequence
  Artificial Peptide
STLPETTVVRR

SEQ ID NO: 3721 - protein, 9 aa, Artificial Sequence
  Artificial Peptide
GSTHVSWPK

SEQ ID NO: 3722 - protein, 9 aa, Artificial Sequence
  Artificial Peptide
FVLGGCRHK

SEQ ID NO: 3723 - protein, 9 aa, Artificial Sequence
  Artificial Peptide
NVSIPWTHK

SEQ ID NO: 3724 - protein, 10 aa, Artificial Sequence
  Artificial Peptide
LVVDFSQFSR

SEQ ID NO: 3725 - protein, 10 aa, Artificial Sequence
  Artificial Peptide
QAFTFSPTYK

SEQ ID NO: 3726 - protein, 9 aa, Artificial Sequence
  Artificial Peptide
SAICSVVRR

SEQ ID NO: 3727 - protein, 10 aa, Artificial Sequence
  Artificial Peptide
TLWKAGILYK

SEQ ID NO: 3728 - protein, 9 aa, Artificial Sequence
  Artificial Peptide
KVGNFTGLY

SEQ ID NO: 3729 - protein, 10 aa, Artificial Sequence
  Artificial Peptide
FPHCLAFSYM

SEQ ID NO: 3730 - protein, 9 aa, Artificial Sequence
  Artificial Peptide
LPSDFFPSV

SEQ ID NO: 3731 - protein, 9 aa, Artificial Sequence
  Artificial Peptide
IPIPSSWAF

SEQ ID NO: 3732 - protein, 9 aa, Artificial Sequence
  Artificial Peptide
HPAAMPHLL

SEQ ID NO: 3733 - protein, 9 aa, Artificial Sequence
  Artificial Peptide
LPVCAFSSA

SEQ ID NO: 3734 - protein, 9 aa, Artificial Sequence
  Artificial Peptide
YPALMPLYA

SEQ ID NO: 3735 - protein, 9 aa, Artificial Sequence
  Artificial Peptide
FPHCLAFSY

SEQ ID NO: 3736 - protein, 10 aa, Artificial Sequence
  Artificial Peptide
TPARVTGGVF

SEQ ID NO: 3737 - protein, 15 aa, Artificial Sequence
  Artificial Peptide
ILLLCLIFLLVLLDY

SEQ ID NO: 3738 - protein, 15 aa, Artificial Sequence
  Artificial Peptide
LCLIFLLVLLDYQGM

SEQ ID NO: 3739 - protein, 15 aa, Artificial Sequence
  Artificial Peptide
LVLLDYQGMLPVCPL

SEQ ID NO: 3740 - protein, 15 aa, Artificial Sequence
  Artificial Peptide
RFSWLSLLVPFVQWF

SEQ ID NO: 3741 - protein, 15 aa, Artificial Sequence
  Artificial Peptide
LVPFVQWFVGLSPTV

SEQ ID NO: 3742 - protein, 15 aa, Artificial Sequence
  Artificial Peptide
FVQWFVGLSPTVWLS

SEQ ID NO: 3743 - protein, 15 aa, Artificial Sequence
  Artificial Peptide
ASKLCLGWLWGMDID

SEQ ID NO: 3744 - protein, 15 aa, Artificial Sequence
  Artificial Peptide
LGWLWGMDIDPYKEF

SEQ ID NO: 3745 - protein, 20 aa, Artificial Sequence
  Artificial Peptide
PHHTALRQAILCWGELMTLA

SEQ ID NO: 3746 - protein, 15 aa, Artificial Sequence
  Artificial Peptide
RQLLWFHISCLTFGR

SEQ ID NO: 3747 - protein, 15 aa, Artificial Sequence
  Artificial Peptide
EYLVSFGVWIRTPPA

SEQ ID NO: 3748 - protein, 15 aa, Artificial Sequence
  Artificial Peptide
GVWIRTPPAYRPPNA

SEQ ID NO: 3749 - protein, 15 aa, Artificial Sequence
  Artificial Peptide
PPAYRPPNAPILSTL

SEQ ID NO: 3750 - protein, 15 aa, Artificial Sequence
  Artificial Peptide
NAPILSTLPETTVVR

SEQ ID NO: 3751 - protein, 15 aa, Artificial Sequence
  Artificial Peptide
AEDLNLGNLNVSIPW

SEQ ID NO: 3752 - protein, 15 aa, Artificial Sequence
  Artificial Peptide
NLNVSIPWTHKVGNF

SEQ ID NO: 3753 - protein, 15 aa, Artificial Sequence
  Artificial Peptide
RHYLHTLWKAGILYK

SEQ ID NO: 3754 - protein, 15 aa, Artificial Sequence
  Artificial Peptide
KFAVPNLQSLTNLLS

SEQ ID NO: 3755 - protein, 15 aa, Artificial Sequence
  Artificial Peptide
VPNLQSLTNLLSSNL

SEQ ID NO: 3756 - protein, 15 aa, Artificial Sequence
  Artificial Peptide
LQSLTNLLSSNLSWL

SEQ ID NO: 3757 - protein, 15 aa, Artificial Sequence
  Artificial Peptide
TNLLSSNLSWLSLDV

SEQ ID NO: 3758 - protein, 15 aa, Artificial Sequence
  Artificial Peptide
SSNLSWLSLDVSAAF

SEQ ID NO: 3759 - protein, 15 aa, Artificial Sequence
  Artificial Peptide
PFLLAQFTSAICSVV

SEQ ID NO: 3760 - protein, 15 aa, Artificial Sequence
  Artificial Peptide
LAQFTSAICSVVRRA

SEQ ID NO: 3761 - protein, 15 aa, Artificial Sequence
  Artificial Peptide
CSVVRRAFPHCLAFS

SEQ ID NO: 3762 - protein, 15 aa, Artificial Sequence
  Artificial Peptide
RRAFPHCLAFSYMDD

SEQ ID NO: 3763 - protein, 15 aa, Artificial Sequence
  Artificial Peptide
AFSYMDDVVLGAKSV

SEQ ID NO: 3764 - protein, 15 aa, Artificial Sequence
  Artificial Peptide
DWKVCQRIVGLLGFA

SEQ ID NO: 3765 - protein, 15 aa, Artificial Sequence
  Artificial Peptide
VGLLGFAAPFTQCGY

SEQ ID NO: 3766 - protein, 15 aa, Artificial Sequence
  Artificial Peptide
AAPFTQCGYPALMPL

SEQ ID NO: 3767 - protein, 15 aa, Artificial Sequence
  Artificial Peptide
QCGYPALMPLYACIQ

SEQ ID NO: 3768 - protein, 15 aa, Artificial Sequence
  Artificial Peptide
LCQVFADATPTGWGL

SEQ ID NO: 3769 - protein, 15 aa, Artificial Sequence
  Artificial Peptide
SVVLSRKYTSFPWLL

SEQ ID NO: 3770 - protein, 15 aa, Artificial Sequence
  Artificial Peptide
RDVLCLRPVGAESRG

SEQ ID NO: 3771 - protein, 15 aa, Artificial Sequence
  Artificial Peptide
GAHLSLRGLPVCAFS

SEQ ID NO: 3772 - protein, 15 aa, Artificial Sequence
  Artificial Peptide
VCAFSSAGPCALRFT

SEQ ID NO: 3773 - protein, 15 aa, Artificial Sequence
  Artificial Peptide
SVRFSWLSLLVPFVQ

SEQ ID NO: 3774 - protein, 15 aa, Artificial Sequence
  Artificial Peptide
RDLLDTASALYREAL

SEQ ID NO: 3775 - protein, 15 aa, Artificial Sequence
  Artificial Peptide
VGNFTGLYSSTVPVF

SEQ ID NO: 3776 - protein, 15 aa, Artificial Sequence
  Artificial Peptide
TNFLLSLGIHLNPNK

SEQ ID NO: 3777 - protein, 15 aa, Artificial Sequence
  Artificial Peptide
YPALMPLYACIQSKQ

SEQ ID NO: 3778 - protein, 15 aa, Artificial Sequence
  Artificial Peptide
KQAFTFSPTYKAFLC

SEQ ID NO: 3779 - protein, 15 aa, Artificial Sequence
  Artificial Peptide
PLPIHTAELLAACFA

SEQ ID NO: 3780 - protein, 15 aa, Artificial Sequence
  Artificial Peptide
GTSFVYVPSALNPAD

SEQ ID NO: 3781 - protein, 12 aa, Artificial Sequence
  Artificial Peptide
PLGFFPDHQLDP

SEQ ID NO: 3782 - protein, 15 aa, Artificial Sequence
  Artificial Peptide
FLLVLLDYQGMLPVC

SEQ ID NO: 3783 - protein, 20 aa, Artificial Sequence
  Artificial Peptide
RDLLDTASALYREALESPEH

SEQ ID NO: 3784 - protein, 15 aa, Artificial Sequence
  Artificial Peptide
AGPLEEELPRLADEG

SEQ ID NO: 3785 - protein, 15 aa, Artificial Sequence
  Artificial Peptide
NRRVAEDLNLGNLNV

SEQ ID NO: 3786 - protein, 15 aa, Artificial Sequence
  Artificial Peptide
VGPLTVNEKRRLKLI

SEQ ID NO: 3787 - protein, 15 aa, Artificial Sequence
  Artificial Peptide
TKYLPLDKGIKPYYP

SEQ ID NO: 3788 - protein, 15 aa, Artificial Sequence
  Artificial Peptide
GGVFLVDKNPHNTTE

SEQ ID NO: 3789 - protein, 15 aa, Artificial Sequence
  Artificial Peptide
ESRLVVDFSQFSRGN

SEQ ID NO: 3790 - protein, 15 aa, Artificial Sequence
  Artificial Peptide
NLSWLSLDVSAAFYH

SEQ ID NO: 3791 - protein, 15 aa, Artificial Sequence
  Artificial Peptide
AFTFSPTYKAFLCKQ

SEQ ID NO: 3792 - protein, 15 aa, Artificial Sequence
  Artificial Peptide
LRPVGAESRGRPVSG

SEQ ID NO: 3793 - protein, 20 aa, Artificial Sequence
  Artificial Peptide
PLLVLQAGFFLLTRILTIPQ

SEQ ID NO: 3794 - protein, 20 aa, Artificial Sequence
  Artificial Peptide
SLDSWWTSLNFLGGTTVCLG

SEQ ID NO: 3795 - protein, 20 aa, Artificial Sequence
  Artificial Peptide
GYRWMCLRRFIIFLFILLLC

SEQ ID NO: 3796 - protein, 15 aa, Artificial Sequence
  Artificial Peptide
PQAMQWNSTTFHQTL

SEQ ID NO: 3797 - protein, 15 aa, Artificial Sequence
  Artificial Peptide
AGFFLLTRILTIPQS

SEQ ID NO: 3798 - protein, 15 aa, Artificial Sequence
  Artificial Peptide
IFLFILLLCLIFLLV

SEQ ID NO: 3799 - protein, 20 aa, Artificial Sequence
  Artificial Peptide
VSFGVWIRTPPAYRPPNAPI

SEQ ID NO: 3800 - protein, 15 aa, Artificial Sequence
  Artificial Peptide
SFGVWIRTPPAYRPP

SEQ ID NO: 3801 - protein, 15 aa, Artificial Sequence
  Artificial Peptide
LHLYSHPIILGFRKI

SEQ ID NO: 3802 - protein, 15 aa, Artificial Sequence
  Artificial Peptide
KQCFRKLPVNRPIDW

SEQ ID NO: 3803 - protein, 15 aa, Artificial Sequence
  Artificial Peptide
AANWILRGTSFVYVP

SEQ ID NO: 3804 - protein, 15 aa, Artificial Sequence
  Artificial Peptide
PDRVHFASPLHVAWR

SEQ ID NO: 3805 - protein, 15 aa, Artificial Sequence
  Artificial Peptide
LQSLTNLLSSNLSWL

SEQ ID NO: 3806 - protein, 15 aa, Artificial Sequence
  Artificial Peptide
KQAFTFSPTYKAFLC

SEQ ID NO: 3807 - protein, 15 aa, Artificial Sequence
  Artificial Peptide
AGFFLLTRILTIPQS

SEQ ID NO: 3808 - protein, 15 aa, Artificial Sequence
  Artificial Peptide
GTSFVYVPSALNPAD

SEQ ID NO: 3809 - protein, 15 aa, Artificial Sequence
  Artificial Peptide
SFGVWIRTPPAYRPP

SEQ ID NO: 3810 - protein, 15 aa, Artificial Sequence
  Artificial Peptide
GVWIRTPPAYRPPNA

SEQ ID NO: 3811 - protein, 20 aa, Artificial Sequence
  Artificial Peptide
VSFGVWIRTPPAYRPPNAPI

SEQ ID NO: 3812 - protein, 15 aa, Artificial Sequence
  Artificial Peptide
RHYLHTLWKAGILYK

SEQ ID NO: 3813 - protein, 15 aa, Artificial Sequence
  Artificial Peptide
LVPFVQWFVGLSPTV

SEQ ID NO: 3814 - protein, 15 aa, Artificial Sequence
  Artificial Peptide
LHLYSHPIILGFRKI

SEQ ID NO: 3815 - protein, 15 aa, Artificial Sequence
  Artificial Peptide
PFLLAQFTSAICSVV

SEQ ID NO: 3816 - protein, 15 aa, Artificial Sequence
  Artificial Peptide
KQCFRKLPVNRPIDW

SEQ ID NO: 3817 - protein, 15 aa, Artificial Sequence
  Artificial Peptide
AANWILRGTSFVYVP

SEQ ID NO: 3818 - protein, 20 aa, Artificial Sequence
  Artificial Peptide
PHHTALRQAILCWGELMTLA

SEQ ID NO: 3819 - protein, 15 aa, Artificial Sequence
  Artificial Peptide
LCQVFADATPTGWGL

SEQ ID NO: 3820 - protein, 15 aa, Artificial Sequence
  Artificial Peptide
ESRLVVDFSQFSRGN

SEQ ID NO: 3821 - protein, 15 aa, Artificial Sequence
  Artificial Peptide
VGPLTVNEKRRLKLI

SEQ ID NO: 3822 - protein, 15 aa, Artificial Sequence
  Artificial Peptide
SSNLSWLSLDVSAAF

SEQ ID NO: 3823 - protein, 15 aa, Artificial Sequence
  Artificial Peptide
NLSWLSLDVSAAFYH

SEQ ID NO: 3824 - protein, 10 aa, Artificial Sequence
  Artificial Peptide
FLPSDFFPSV

SEQ ID NO: 3825 - protein, 9 aa, Artificial Sequence
  Artificial Peptide
FLLTRILTI

SEQ ID NO: 3826 - protein, 9 aa, Artificial Sequence
  Artificial Peptide
ALMPLYACI

SEQ ID NO: 3827 - protein, 9 aa, Artificial Sequence
  Artificial Peptide
WLSLLVPFV

SEQ ID NO: 3828 - protein, 9 aa, Artificial Sequence
  Artificial Peptide
YMDDVVLGV

SEQ ID NO: 3829 - protein, 9 aa, Artificial Sequence
  Artificial Peptide
GLSRYVARL

SEQ ID NO: 3830 - protein, 9 aa, Artificial Sequence
  Artificial Peptide
FLLSLGIHL

SEQ ID NO: 3831 - protein, 10 aa, Artificial Sequence
  Artificial Peptide
LLPIFFCLWV

SEQ ID NO: 3832 - protein, 10 aa, Artificial Sequence
  Artificial Peptide
LLVPFVQWFV

SEQ ID NO: 3833 - protein, 11 aa, Artificial Sequence
  Artificial Peptide
HTLWKAGILYK

SEQ ID NO: 3834 - protein, 11 aa, Artificial Sequence
  Artificial Peptide
STLPETTVVRR

SEQ ID NO: 3835 - protein, 9 aa, Artificial Sequence
  Artificial Peptide
NVSIPWTHK

SEQ ID NO: 3836 - protein, 10 aa, Artificial Sequence
  Artificial Peptide
LVVDFSQFSR

SEQ ID NO: 3837 - protein, 10 aa, Artificial Sequence
  Artificial Peptide
QAFTFSPTYK

SEQ ID NO: 3838 - protein, 9 aa, Artificial Sequence
  Artificial Peptide
SAICSVVRR

SEQ ID NO: 3839 - protein, 9 aa, Artificial Sequence
  Artificial Peptide
KVGNFTGLY

SEQ ID NO: 3840 - protein, 10 aa, Artificial Sequence
  Artificial Peptide
FPHCLAFSYM

SEQ ID NO: 3841 - protein, 9 aa, Artificial Sequence
  Artificial Peptide
LPSDFFPSV

SEQ ID NO: 3842 - protein, 9 aa, Artificial Sequence
  Artificial Peptide
IPIPSSWAF

SEQ ID NO: 3843 - protein, 9 aa, Artificial Sequence
  Artificial Peptide
HPAAMPHLL

SEQ ID NO: 3844 - protein, 11 aa, Artificial Sequence
  Artificial Peptide
YPALMPLYACI

SEQ ID NO: 3845 - protein, 10 aa, Artificial Sequence
  Artificial Peptide
TPARVTGGVF

SEQ ID NO: 3846 - protein, 10 aa, Artificial Sequence
  Artificial Peptide
DLLDTASALY

SEQ ID NO: 3847 - protein, 10 aa, Artificial Sequence
  Artificial Peptide
LSLDVSAAFY

SEQ ID NO: 3848 - protein, 11 aa, Artificial Sequence
  Artificial Peptide
WMMWYWGPSLY

SEQ ID NO: 3849 - protein, 10 aa, Artificial Sequence
  Artificial Peptide
RWMCLRRFII

SEQ ID NO: 3850 - protein, 9 aa, Artificial Sequence
  Artificial Peptide
SWLSLLVPF

SEQ ID NO: 3851 - protein, 9 aa, Artificial Sequence
  Artificial Peptide
SWWTSLNFL

SEQ ID NO: 3852 - protein, 10 aa, Artificial Sequence
  Artificial Peptide
EYLVSFGVWI

SEQ ID NO: 3853 - protein, 9 aa, Artificial Sequence
  Artificial Peptide
AYRPPNAPI

SEQ ID NO: 3854 - protein, 9 aa, Artificial Sequence
  Artificial Peptide
WFHISCLTF

SEQ ID NO: 3855 - protein, 10 aa, Artificial Sequence
  Artificial Peptide
SWPKFAVPNL

SEQ ID NO: 3856 - protein, 9 aa, Artificial Sequence
  Artificial Peptide
KYTSFPWLL

SEQ ID NO: 3857 - protein, 10 aa, Artificial Sequence
  Artificial Peptide
LYSHPIILGF

SEQ ID NO: 3858 - protein, 15 aa, Artificial Sequence
  Artificial Peptide
LQSLTNLLSSNLSWL

SEQ ID NO: 3859 - protein, 15 aa, Artificial Sequence
  Artificial Peptide
KQAFTFSPTYKAFLC

SEQ ID NO: 3860 - protein, 15 aa, Artificial Sequence
  Artificial Peptide
AGFFLLTRILTIPQS

SEQ ID NO: 3861 - protein, 15 aa, Artificial Sequence
  Artificial Peptide
GTSFVYVPSALNPAD

SEQ ID NO: 3862 - protein, 20 aa, Artificial Sequence
  Artificial Peptide
VSFGVWIRTPPAYRPPNAPI

SEQ ID NO: 3863 - protein, 15 aa, Artificial Sequence
  Artificial Peptide
RHYLHTLWKAGILYK

SEQ ID NO: 3864 - protein, 15 aa, Artificial Sequence
  Artificial Peptide
LVPFVQWFVGLSPTV

SEQ ID NO: 3865 - protein, 15 aa, Artificial Sequence
  Artificial Peptide
LHLYSHPIILGFRKI

SEQ ID NO: 3866 - protein, 15 aa, Artificial Sequence
  Artificial Peptide
PFLLAQFTSAICSVV

SEQ ID NO: 3867 - protein, 15 aa, Artificial Sequence
  Artificial Peptide
KQCFRKLPVNRPIDW

SEQ ID NO: 3868 - protein, 15 aa, Artificial Sequence
  Artificial Peptide
AANWILRGTSFVYVP

SEQ ID NO: 3869 - protein, 20 aa, Artificial Sequence
  Artificial Peptide
PHHTALRQAILCWGELMTLA

SEQ ID NO: 3870 - protein, 15 aa, Artificial Sequence
  Artificial Peptide
LCQVFADATPTGWGL

SEQ ID NO: 3871 - protein, 15 aa, Artificial Sequence
  Artificial Peptide
ESRLVVDFSQFSRGN

SEQ ID NO: 3872 - protein, 15 aa, Artificial Sequence
  Artificial Peptide
VGPLTVNEKRRLKLI

SEQ ID NO: 3873 - protein, 15 aa, Artificial Sequence
  Artificial Peptide
SSNLSWLSLDVSAAF

SEQ ID NO: 3874 - protein, 14 aa, Artificial Sequence
  Artificial Peptide
QYIKANSKFIGITE

SEQ ID NO: 3875 - protein, 21 aa, Artificial Sequence
  Artificial Peptide
DIEKKIAKMEKASSVFNVVNS

SEQ ID NO: 3876 - protein, 16 aa, Artificial Sequence
  Artificial Peptide
GAVDSILGGVATYGAA

SEQ ID NO: 3877 - protein, 13 aa, Artificial Sequence
  Artificial Peptide
  MOD_RES (3)...(3): Xaa = cyclohexyalanine, Phe or Tyr
AKXVWANTLKAAA

SEQ ID NO: 3878 - protein, 9 aa, Artificial Sequence
  DR7 preferred motif
  VARIANT (1)..(1): Met, Phe, Leu, Ile, Val, Trp, or Tyr
  VARIANT (5)..(5): May be any amino acid
  VARIANT (6)..(6): Ile, Val, Met, Ser, Ala, Cys, Thr, Pro, or Leu
  VARIANT (8)..(8): May be any amino acid
  VARIANT (9)..(9): Ile or Val
XMWAXXMXX

SEQ ID NO: 3879 - protein, 9 aa, Artificial Sequence
  DR7 deleterious motif
  VARIANT (1)..(1): May be any amino acid
  VARIANT (3)..(3): May be any amino acid
  VARIANT (5)..(6): May be any amino acid
  VARIANT (7)..(7): Gly, Arg, or Asp
XCXGXXXNG
